United States Patent Application Publication US 2026/0015627 A1 - sequence listing, part 3

SEQ ID NO: 26430 - DNA, 20 bp, synthetic construct
  source 1..20: mol_type = other DNA
tggcccaaccatgcctctgt

SEQ ID NO: 26431 - DNA, 20 bp, synthetic construct
  source 1..20: mol_type = other DNA
ggcttcggccgccggggcca

SEQ ID NO: 26432 - DNA, 20 bp, synthetic construct
  source 1..20: mol_type = other DNA
tgtgtcccacccttcctagc

SEQ ID NO: 26433 - DNA, 20 bp, synthetic construct
  source 1..20: mol_type = other DNA
ggaaaagtgcccttgagcct

SEQ ID NO: 26434 - DNA, 20 bp, synthetic construct
  source 1..20: mol_type = other DNA
ctgcggacattcagggatcg

SEQ ID NO: 26435 - DNA, 20 bp, synthetic construct
  source 1..20: mol_type = other DNA
ggggtcacagctggccactg

SEQ ID NO: 26436 - DNA, 20 bp, synthetic construct
  source 1..20: mol_type = other DNA
cactctccctcgagcgccgc

SEQ ID NO: 26437 - DNA, 20 bp, synthetic construct
  source 1..20: mol_type = other DNA
caggaggactacttccagca

SEQ ID NO: 26438 - DNA, 20 bp, synthetic construct
  source 1..20: mol_type = other DNA
tacacccaccgaggcatggg

SEQ ID NO: 26439 - DNA, 20 bp, synthetic construct
  source 1..20: mol_type = other DNA
gcggatccccagccgtccct

SEQ ID NO: 26440 - DNA, 20 bp, synthetic construct
  source 1..20: mol_type = other DNA
cgcaccaccccccctcccgc

SEQ ID NO: 26441 - DNA, 20 bp, synthetic construct
  source 1..20: mol_type = other DNA
ttggctgcatttctggcctc

SEQ ID NO: 26442 - DNA, 20 bp, synthetic construct
  source 1..20: mol_type = other DNA
ctcttactccaaaaagatgg

SEQ ID NO: 26443 - DNA, 20 bp, synthetic construct
  source 1..20: mol_type = other DNA
gatggagccgttcctcagga

SEQ ID NO: 26444 - DNA, 20 bp, synthetic construct
  source 1..20: mol_type = other DNA
gtcctggccggataccgcgc

SEQ ID NO: 26445 - DNA, 20 bp, synthetic construct
  source 1..20: mol_type = other DNA
tttaacgagcagacgccccc

SEQ ID NO: 26446 - DNA, 20 bp, synthetic construct
  source 1..20: mol_type = other DNA
ctgggctgccggtgacctgg

SEQ ID NO: 26447 - DNA, 20 bp, synthetic construct
  source 1..20: mol_type = other DNA
ctcagcttcgagccgaggtg

SEQ ID NO: 26448 - DNA, 20 bp, synthetic construct
  source 1..20: mol_type = other DNA
ccgcggaggagcaggagagg

SEQ ID NO: 26449 - DNA, 20 bp, synthetic construct
  source 1..20: mol_type = other DNA
atggcgggagctccggacga

SEQ ID NO: 26450 - DNA, 20 bp, synthetic construct
  source 1..20: mol_type = other DNA
actcggattgctctccgccc

SEQ ID NO: 26451 - DNA, 20 bp, synthetic construct
  source 1..20: mol_type = other DNA
cttccgtcgctccttgccgg

SEQ ID NO: 26452 - DNA, 20 bp, synthetic construct
  source 1..20: mol_type = other DNA
ctgggagccgaggcgtcggt

SEQ ID NO: 26453 - DNA, 20 bp, synthetic construct
  source 1..20: mol_type = other DNA
gaagcagtaccttgaagaga

SEQ ID NO: 26454 - DNA, 20 bp, synthetic construct
  source 1..20: mol_type = other DNA
ccgtgtccgcgaccgcgtac

SEQ ID NO: 26455 - DNA, 20 bp, synthetic construct
  source 1..20: mol_type = other DNA
tccggcgggcgtgttgggtg

SEQ ID NO: 26456 - DNA, 20 bp, synthetic construct
  source 1..20: mol_type = other DNA
ctagcccctaaccatgggcc

SEQ ID NO: 26457 - DNA, 20 bp, synthetic construct
  source 1..20: mol_type = other DNA
cccacaggcgtgaacctgct

SEQ ID NO: 26458 - DNA, 20 bp, synthetic construct
  source 1..20: mol_type = other DNA
gccgtgccgggggctaactg

SEQ ID NO: 26459 - DNA, 20 bp, synthetic construct
  source 1..20: mol_type = other DNA
ccttggagccaccgccccct

SEQ ID NO: 26460 - DNA, 20 bp, synthetic construct
  source 1..20: mol_type = other DNA
gggactggtctgaagagacg

SEQ ID NO: 26461 - DNA, 20 bp, synthetic construct
  source 1..20: mol_type = other DNA
atgcggccgtgagccggcgg

SEQ ID NO: 26462 - DNA, 20 bp, synthetic construct
  source 1..20: mol_type = other DNA
tggataaagacctcctgaaa

SEQ ID NO: 26463 - DNA, 20 bp, synthetic construct
  source 1..20: mol_type = other DNA
caccggcaaaggctgtctag

SEQ ID NO: 26464 - DNA, 20 bp, synthetic construct
  source 1..20: mol_type = other DNA
caacaccccacccggcggga

SEQ ID NO: 26465 - DNA, 20 bp, synthetic construct
  source 1..20: mol_type = other DNA
cggtgggttcgggaacctgt

SEQ ID NO: 26466 - DNA, 20 bp, synthetic construct
  source 1..20: mol_type = other DNA
ggtccgatctggacgaacgc

SEQ ID NO: 26467 - DNA, 20 bp, synthetic construct
  source 1..20: mol_type = other DNA
cccttgacccagtggatatc

SEQ ID NO: 26468 - DNA, 20 bp, synthetic construct
  source 1..20: mol_type = other DNA
gtttcctctccgcgtactcg

SEQ ID NO: 26469 - DNA, 20 bp, synthetic construct
  source 1..20: mol_type = other DNA
gcaggcgactcctgtcccgg

SEQ ID NO: 26470 - DNA, 20 bp, synthetic construct
  source 1..20: mol_type = other DNA
ctttccttcgcgtcctgaac

SEQ ID NO: 26471 - DNA, 20 bp, synthetic construct
  source 1..20: mol_type = other DNA
ttgttgacactgcgagcact

SEQ ID NO: 26472 - DNA, 20 bp, synthetic construct
  source 1..20: mol_type = other DNA
caaggggcggccggcgagtc

SEQ ID NO: 26473 - DNA, 20 bp, synthetic construct
  source 1..20: mol_type = other DNA
cgaaggtcccggagcgttca

SEQ ID NO: 26474 - DNA, 20 bp, synthetic construct
  source 1..20: mol_type = other DNA
ttcgcacggccacaggggcg

SEQ ID NO: 26475 - DNA, 20 bp, synthetic construct
  source 1..20: mol_type = other DNA
ggtccgcgtgggcgctgggg

SEQ ID NO: 26476 - DNA, 20 bp, synthetic construct
  source 1..20: mol_type = other DNA
cttccttgaaaaacccggcg

SEQ ID NO: 26477 - DNA, 20 bp, synthetic construct
  source 1..20: mol_type = other DNA
tggagcaggcagggcagtct

SEQ ID NO: 26478 - DNA, 20 bp, synthetic construct
  source 1..20: mol_type = other DNA
gaaagggtctagccatgctg

SEQ ID NO: 26479 - DNA, 20 bp, synthetic construct
  source 1..20: mol_type = other DNA
caagtctctcctccctagcg

SEQ ID NO: 26480 - DNA, 20 bp, synthetic construct
  source 1..20: mol_type = other DNA
gagcgtcccgagacttcttc

SEQ ID NO: 26481 - DNA, 20 bp, synthetic construct
  source 1..20: mol_type = other DNA
ctgcgtgctgcagtagcgcc

SEQ ID NO: 26482 - DNA, 20 bp, synthetic construct
  source 1..20: mol_type = other DNA
gcgcaactgagaggaactga

SEQ ID NO: 26483 - DNA, 20 bp, synthetic construct
  source 1..20: mol_type = other DNA
gagctgggacgggcggcggc

SEQ ID NO: 26484 - DNA, 20 bp, synthetic construct
  source 1..20: mol_type = other DNA
gatgcagcgccccgggccct

SEQ ID NO: 26485 - DNA, 20 bp, synthetic construct
  source 1..20: mol_type = other DNA
tcagaggtaaggagaatttt

SEQ ID NO: 26486 - DNA, 20 bp, synthetic construct
  source 1..20: mol_type = other DNA
ggggcggctgtggagcctgt

SEQ ID NO: 26487 - DNA, 20 bp, synthetic construct
  source 1..20: mol_type = other DNA
gtcagagagcccgcggctta

SEQ ID NO: 26488 - DNA, 20 bp, synthetic construct
  source 1..20: mol_type = other DNA
tgtgagtgggaggcggcggc

SEQ ID NO: 26489 - DNA, 20 bp, synthetic construct
  source 1..20: mol_type = other DNA
tgtggtggtgtgagtgggag

SEQ ID NO: 26490 - DNA, 20 bp, synthetic construct
  source 1..20: mol_type = other DNA
ctcccgcgcggctgactcca

SEQ ID NO: 26491 - DNA, 20 bp, synthetic construct
  source 1..20: mol_type = other DNA
gcacggggggcgcgggagga

SEQ ID NO: 26492 - DNA, 20 bp, synthetic construct
  source 1..20: mol_type = other DNA
cgtgtgctcggcctttctgt

SEQ ID NO: 26493 - DNA, 20 bp, synthetic construct
  source 1..20: mol_type = other DNA
ctctgctgaggatggaagtg

SEQ ID NO: 26494 - DNA, 20 bp, synthetic construct
  source 1..20: mol_type = other DNA
gttttcggctctgaagaggt

SEQ ID NO: 26495 - DNA, 20 bp, synthetic construct
  source 1..20: mol_type = other DNA
gctcgggcggagctggagac

SEQ ID NO: 26496 - DNA, 20 bp, synthetic construct
  source 1..20: mol_type = other DNA
acgggtgcgtccgggcggct

SEQ ID NO: 26497 - DNA, 20 bp, synthetic construct
  source 1..20: mol_type = other DNA
ggtggctgtggcggtggcgc

SEQ ID NO: 26498 - DNA, 20 bp, synthetic construct
  source 1..20: mol_type = other DNA
gagactctgcgctccggcgg

SEQ ID NO: 26499 - DNA, 20 bp, synthetic construct
  source 1..20: mol_type = other DNA
accccgggacagtccctctc

SEQ ID NO: 26500 - DNA, 20 bp, synthetic construct
  source 1..20: mol_type = other DNA
aggcggcgcgggggctgctg

SEQ ID NO: 26501 - DNA, 20 bp, synthetic construct
  source 1..20: mol_type = other DNA
gcggctgacagcagcagcgg

SEQ ID NO: 26502 - DNA, 20 bp, synthetic construct
  source 1..20: mol_type = other DNA
tcctgggaatcttcaatcac

SEQ ID NO: 26503 - DNA, 20 bp, synthetic construct
  source 1..20: mol_type = other DNA
gtttgtctgtgtttctggac

SEQ ID NO: 26504 - DNA, 20 bp, synthetic construct
  source 1..20: mol_type = other DNA
cgaccagtgctgcgatcccg

SEQ ID NO: 26505 - DNA, 20 bp, synthetic construct
  source 1..20: mol_type = other DNA
gcacctggtgactgggaagc

SEQ ID NO: 26506 - DNA, 20 bp, synthetic construct
  source 1..20: mol_type = other DNA
tggctctttctcttcttggg

SEQ ID NO: 26507 - DNA, 20 bp, synthetic construct
  source 1..20: mol_type = other DNA
aaagagcaagcactgaggcc

SEQ ID NO: 26508 - DNA, 20 bp, synthetic construct
  source 1..20: mol_type = other DNA
acctgcgcccggaggtcgcc

SEQ ID NO: 26509 - DNA, 20 bp, synthetic construct
  source 1..20: mol_type = other DNA
tggtcttgaactcagggtcc

SEQ ID NO: 26510 - DNA, 20 bp, synthetic construct
  source 1..20: mol_type = other DNA
gcaggcgccgacgctgcggc

SEQ ID NO: 26511 - DNA, 20 bp, synthetic construct
  source 1..20: mol_type = other DNA
ccgtcgttgacgttagtcgc

SEQ ID NO: 26512 - DNA, 20 bp, synthetic construct
  source 1..20: mol_type = other DNA
cctaaacttcagcttctcag

SEQ ID NO: 26513 - DNA, 20 bp, synthetic construct
  source 1..20: mol_type = other DNA
tgtgcggggcgctgagcctg

SEQ ID NO: 26514 - DNA, 20 bp, synthetic construct
  source 1..20: mol_type = other DNA
acgcatctgcctttttttcc

SEQ ID NO: 26515 - DNA, 20 bp, synthetic construct
  source 1..20: mol_type = other DNA
aagtcagcattggcgcccct

SEQ ID NO: 26516 - DNA, 20 bp, synthetic construct
  source 1..20: mol_type = other DNA
atttgagccgctgttgagat

SEQ ID NO: 26517 - DNA, 20 bp, synthetic construct
  source 1..20: mol_type = other DNA
taaagacaaggattggatta

SEQ ID NO: 26518 - DNA, 20 bp, synthetic construct
  source 1..20: mol_type = other DNA
tggggctgggttcctctctt

SEQ ID NO: 26519 - DNA, 20 bp, synthetic construct
  source 1..20: mol_type = other DNA
gcacctagacctggggccag

SEQ ID NO: 26520 - DNA, 20 bp, synthetic construct
  source 1..20: mol_type = other DNA
caagatggcagcaatgagga

SEQ ID NO: 26521 - DNA, 20 bp, synthetic construct
  source 1..20: mol_type = other DNA
acacaccagccctcagtcac

SEQ ID NO: 26522 - DNA, 20 bp, synthetic construct
  source 1..20: mol_type = other DNA
gaaatttaccactctcctct

SEQ ID NO: 26523 - DNA, 20 bp, synthetic construct
  source 1..20: mol_type = other DNA
catttgcatggtggccctgt

SEQ ID NO: 26524 - DNA, 20 bp, synthetic construct
  source 1..20: mol_type = other DNA
agagagccagcatcttggca

SEQ ID NO: 26525 - DNA, 20 bp, synthetic construct
  source 1..20: mol_type = other DNA
tactgtggtttagggcttgg

SEQ ID NO: 26526 - DNA, 20 bp, synthetic construct
  source 1..20: mol_type = other DNA
gtgaaaactttgaggattac

SEQ ID NO: 26527 - DNA, 20 bp, synthetic construct
  source 1..20: mol_type = other DNA
gccaccctgccctgcccacc

SEQ ID NO: 26528 - DNA, 20 bp, synthetic construct
  source 1..20: mol_type = other DNA
tggcaacgcagtacacaagt

SEQ ID NO: 26529 - DNA, 20 bp, synthetic construct
  source 1..20: mol_type = other DNA
ccaaatctctttttgatttt

SEQ ID NO: 26530 - DNA, 20 bp, synthetic construct
  source 1..20: mol_type = other DNA
cttagagcttgagagtcaaa

SEQ ID NO: 26531 - DNA, 20 bp, synthetic construct
  source 1..20: mol_type = other DNA
tgcttaggctccgcggcctc

SEQ ID NO: 26532 - DNA, 20 bp, synthetic construct
  source 1..20: mol_type = other DNA
gggaacccgtgcggctggag

SEQ ID NO: 26533 - DNA, 20 bp, synthetic construct
  source 1..20: mol_type = other DNA
tttggaatctggcaaccatt

SEQ ID NO: 26534 - DNA, 20 bp, synthetic construct
  source 1..20: mol_type = other DNA
ttacaatcacaagcttttac

SEQ ID NO: 26535 - DNA, 20 bp, synthetic construct
  source 1..20: mol_type = other DNA
gagcgccggggctcccggag

SEQ ID NO: 26536 - DNA, 20 bp, synthetic construct
  source 1..20: mol_type = other DNA
cctccttggccaaggccagg

SEQ ID NO: 26537 - DNA, 20 bp, synthetic construct
  source 1..20: mol_type = other DNA
tgtatttcgggtcttgctgg

SEQ ID NO: 26538 - DNA, 20 bp, synthetic construct
  source 1..20: mol_type = other DNA
ccgggagacttccggcaggg

SEQ ID NO: 26539 - DNA, 20 bp, synthetic construct
  source 1..20: mol_type = other DNA
aatgtggagctaggatcaag

SEQ ID NO: 26540 - DNA, 20 bp, synthetic construct
  source 1..20: mol_type = other DNA
atttctgtgtgcaggcgagc

SEQ ID NO: 26541 - DNA, 20 bp, synthetic construct
  source 1..20: mol_type = other DNA
ttatcactgcacctcttgcc

SEQ ID NO: 26542 - DNA, 20 bp, synthetic construct
  source 1..20: mol_type = other DNA
gatgtggcagactttgctcc

SEQ ID NO: 26543 - DNA, 20 bp, synthetic construct
  source 1..20: mol_type = other DNA
agcgggagagacaaaagtcg

SEQ ID NO: 26544 - DNA, 20 bp, synthetic construct
  source 1..20: mol_type = other DNA
gttttctttgctaagattat

SEQ ID NO: 26545 - DNA, 20 bp, synthetic construct
  source 1..20: mol_type = other DNA
aaagtgtttgaaaatgaaca

SEQ ID NO: 26546 - DNA, 20 bp, synthetic construct
  source 1..20: mol_type = other DNA
atggctcaggttgtgcgcag

SEQ ID NO: 26547 - DNA, 20 bp, synthetic construct
  source 1..20: mol_type = other DNA
aggagacttgacagcttaaa

SEQ ID NO: 26548 - DNA, 20 bp, synthetic construct
  source 1..20: mol_type = other DNA
ggtgtcggaggagaactgtg

SEQ ID NO: 26549 - DNA, 20 bp, synthetic construct
  source 1..20: mol_type = other DNA
taactggttcggcatgttcc

SEQ ID NO: 26550 - DNA, 20 bp, synthetic construct
  source 1..20: mol_type = other DNA
ttctttgaattccgtggtcc

SEQ ID NO: 26551 - DNA, 20 bp, synthetic construct
  source 1..20: mol_type = other DNA
actctgaggagcagttggag

SEQ ID NO: 26552 - DNA, 20 bp, synthetic construct
  source 1..20: mol_type = other DNA
tgtctgctcgggacacggct

SEQ ID NO: 26553 - DNA, 20 bp, synthetic construct
  source 1..20: mol_type = other DNA
ctgtggctacaggcttcagc

SEQ ID NO: 26554 - DNA, 20 bp, synthetic construct
  source 1..20: mol_type = other DNA
gaacaaggcagcggctcctt

SEQ ID NO: 26555 - DNA, 20 bp, synthetic construct
  source 1..20: mol_type = other DNA
tctctggcttctcagccttc

SEQ ID NO: 26556 - DNA, 20 bp, synthetic construct
  source 1..20: mol_type = other DNA
acttctttccccctttgcag

SEQ ID NO: 26557 - DNA, 20 bp, synthetic construct
  source 1..20: mol_type = other DNA
tggtgggcctcttcagtcac

SEQ ID NO: 26558 - DNA, 20 bp, synthetic construct
  source 1..20: mol_type = other DNA
gcttctcctcctttggtgag

SEQ ID NO: 26559 - DNA, 20 bp, synthetic construct
  source 1..20: mol_type = other DNA
gtgaggagatggaagaggaa

SEQ ID NO: 26560 - DNA, 20 bp, synthetic construct
  source 1..20: mol_type = other DNA
tgcccgtatctatcgtggcg

SEQ ID NO: 26561 - DNA, 20 bp, synthetic construct
  source 1..20: mol_type = other DNA
agccatgaggatgcttctgc

SEQ ID NO: 26562 - DNA, 20 bp, synthetic construct
  source 1..20: mol_type = other DNA
gcatcgccgccgccagagga

SEQ ID NO: 26563 - DNA, 20 bp, synthetic construct
  source 1..20: mol_type = other DNA
ttggactccgcccgtggagc

SEQ ID NO: 26564 - DNA, 20 bp, synthetic construct
  source 1..20: mol_type = other DNA
tttctgattgataggctttg

SEQ ID NO: 26565 - DNA, 20 bp, synthetic construct
  source 1..20: mol_type = other DNA
aaaaatgagggagagagaaa

SEQ ID NO: 26566 - DNA, 20 bp, synthetic construct
  source 1..20: mol_type = other DNA
acgttggaagaagacctggc

SEQ ID NO: 26567 - DNA, 20 bp, synthetic construct
  source 1..20: mol_type = other DNA
agattggcagggataagcag

SEQ ID NO: 26568 - DNA, 20 bp, synthetic construct
  source 1..20: mol_type = other DNA
acatccaacaagatcggcgt

SEQ ID NO: 26569 - DNA, 20 bp, synthetic construct
  source 1..20: mol_type = other DNA
aactccttgtgctagctgtg

SEQ ID NO: 26570 - DNA, 20 bp, synthetic construct
  source 1..20: mol_type = other DNA
tttctgttgcgggaagctcc

SEQ ID NO: 26571 - DNA, 20 bp, synthetic construct
  source 1..20: mol_type = other DNA
ttccagtgggcctgggccca

SEQ ID NO: 26572 - DNA, 20 bp, synthetic construct
  source 1..20: mol_type = other DNA
tgttgcacctgttcctccct

SEQ ID NO: 26573 - DNA, 20 bp, synthetic construct
  source 1..20: mol_type = other DNA
tctgccttcccagtgcataa

SEQ ID NO: 26574 - DNA, 20 bp, synthetic construct
  source 1..20: mol_type = other DNA
acctcagccagagtccggga

SEQ ID NO: 26575 - DNA, 20 bp, synthetic construct
  source 1..20: mol_type = other DNA
gcaaggcagacttcgtgctg

SEQ ID NO: 26576 - DNA, 20 bp, synthetic construct
  source 1..20: mol_type = other DNA
ttcgtttcttgccagatttg

SEQ ID NO: 26577 - DNA, 20 bp, synthetic construct
  source 1..20: mol_type = other DNA
tcgaccccagccagcgcagc

SEQ ID NO: 26578 - DNA, 20 bp, synthetic construct
  source 1..20: mol_type = other DNA
taaacatggccgtcaccgac

SEQ ID NO: 26579 - DNA, 20 bp, synthetic construct
  source 1..20: mol_type = other DNA
ggacaaccttctcctgacag

SEQ ID NO: 26580 - DNA, 20 bp, synthetic construct
  source 1..20: mol_type = other DNA
ggcctggtgtgaatgctccg

SEQ ID NO: 26581 - DNA, 20 bp, synthetic construct
  source 1..20: mol_type = other DNA
cgctcgactggcctaggagc

SEQ ID NO: 26582 - DNA, 20 bp, synthetic construct
  source 1..20: mol_type = other DNA
cctttccttctgctgctact

SEQ ID NO: 26583 - DNA, 20 bp, synthetic construct
  source 1..20: mol_type = other DNA
ggagtggagcttggtttcgg

SEQ ID NO: 26584 - DNA, 20 bp, synthetic construct
  source 1..20: mol_type = other DNA
caggcacccgtgtggctgcc

SEQ ID NO: 26585 - DNA, 20 bp, synthetic construct
  source 1..20: mol_type = other DNA
cctgtctaccatgttctctg

SEQ ID NO: 26586 - DNA, 20 bp, synthetic construct
  source 1..20: mol_type = other DNA
ggctgactcaactgaaatca

SEQ ID NO: 26587 - DNA, 20 bp, synthetic construct
  source 1..20: mol_type = other DNA
gtggtctgtacaggcggcac

SEQ ID NO: 26588 - DNA, 20 bp, synthetic construct
  source 1..20: mol_type = other DNA
gcagctcatggagaggctga

SEQ ID NO: 26589 - DNA, 20 bp, synthetic construct
  source 1..20: mol_type = other DNA
taagaagccgccccaactcc

SEQ ID NO: 26590 - DNA, 20 bp, synthetic construct
  source 1..20: mol_type = other DNA
tgtatgcacaaagcagggtc

SEQ ID NO: 26591 - DNA, 20 bp, synthetic construct
  source 1..20: mol_type = other DNA
tcgttagcaccctttagcgt

SEQ ID NO: 26592 - DNA, 20 bp, synthetic construct
  source 1..20: mol_type = other DNA
acgagagatccaatgaaagt

SEQ ID NO: 26593 - DNA, 20 bp, synthetic construct
  source 1..20: mol_type = other DNA
gctaatacaacaaatagcaa

SEQ ID NO: 26594 - DNA, 20 bp, synthetic construct
  source 1..20: mol_type = other DNA
actcggcctataaacatcag

SEQ ID NO: 26595 - DNA, 20 bp, synthetic construct
  source 1..20: mol_type = other DNA
cgcatctgagccagccacgc

SEQ ID NO: 26596 - DNA, 20 bp, synthetic construct
  source 1..20: mol_type = other DNA
tagtagatggattacacggt

SEQ ID NO: 26597 - DNA, 20 bp, synthetic construct
  source 1..20: mol_type = other DNA
tcggtgtaccccccccggtg

SEQ ID NO: 26598 - DNA, 20 bp, synthetic construct
  source 1..20: mol_type = other DNA
cacgcgcggtctctgcggaa

SEQ ID NO: 26599 - DNA, 20 bp, synthetic construct
  source 1..20: mol_type = other DNA
gcacatggcggccaatctgt

SEQ ID NO: 26600 - DNA, 20 bp, synthetic construct
  source 1..20: mol_type = other DNA
agagccgcaatgctggagcc

SEQ ID NO: 26601 - DNA, 20 bp, synthetic construct
  source 1..20: mol_type = other DNA
aggccccatggagaaaggtc

SEQ ID NO: 26602 - DNA, 20 bp, synthetic construct
  source 1..20: mol_type = other DNA
cgaggggatcgcccctgaag

SEQ ID NO: 26603 - DNA, 20 bp, synthetic construct
  source 1..20: mol_type = other DNA
catggccggtcacactaaat

SEQ ID NO: 26604 - DNA, 20 bp, synthetic construct
  source 1..20: mol_type = other DNA
accattaatcctgcgacctg

SEQ ID NO: 26605 - DNA, 20 bp, synthetic construct
  source 1..20: mol_type = other DNA
cgacaagaggtgggcgacct

SEQ ID NO: 26606 - DNA, 20 bp, synthetic construct
  source 1..20: mol_type = other DNA
cctaaattacccaccccccg

SEQ ID NO: 26607 - DNA, 20 bp, synthetic construct
  source 1..20: mol_type = other DNA
tcgcccccttgtgtctttac

SEQ ID NO: 26608 - DNA, 20 bp, synthetic construct
  source 1..20: mol_type = other DNA
ccacttggcatccctcccct

SEQ ID NO: 26609 - DNA, 20 bp, synthetic construct
  source 1..20: mol_type = other DNA
attccggcgcctgcgaagca

SEQ ID NO: 26610 - DNA, 20 bp, synthetic construct
  source 1..20: mol_type = other DNA
atcgcacgactagggatggg

SEQ ID NO: 26611 - DNA, 20 bp, synthetic construct
  source 1..20: mol_type = other DNA
gggggtgcagcctcagaatg

SEQ ID NO: 26612 - DNA, 20 bp, synthetic construct
  source 1..20: mol_type = other DNA
atcacatggttgtagtatta

SEQ ID NO: 26613 - DNA, 20 bp, synthetic construct
  source 1..20: mol_type = other DNA
cagggtgtatacgttagttc

SEQ ID NO: 26614 - DNA, 20 bp, synthetic construct
  source 1..20: mol_type = other DNA
ccgcacgcggcatctgcctt

SEQ ID NO: 26615 - DNA, 20 bp, synthetic construct
  source 1..20: mol_type = other DNA
gcccccgatttgacgggcag

SEQ ID NO: 26616 - DNA, 20 bp, synthetic construct
  source 1..20: mol_type = other DNA
tagttctcctcccaggctag

SEQ ID NO: 26617 - DNA, 20 bp, synthetic construct
  source 1..20: mol_type = other DNA
ctcgaccccaaatcccctgt

SEQ ID NO: 26618 - DNA, 20 bp, synthetic construct
  source 1..20: mol_type = other DNA
ccgccacctgtgtccgtgtc

SEQ ID NO: 26619 - DNA, 20 bp, synthetic construct
  source 1..20: mol_type = other DNA
ccgtcacgccgaccagcgat

SEQ ID NO: 26620 - DNA, 20 bp, synthetic construct
  source 1..20: mol_type = other DNA
atccgctcgtcagcccaccg

SEQ ID NO: 26621 - DNA, 20 bp, synthetic construct
  source 1..20: mol_type = other DNA
acgtcgggccccccttagtc

SEQ ID NO: 26622 - DNA, 20 bp, synthetic construct
  source 1..20: mol_type = other DNA
cggtgtgctgtctggtccca

SEQ ID NO: 26623 - DNA, 20 bp, synthetic construct
  source 1..20: mol_type = other DNA
cgtgtaccccggtgcaccct

SEQ ID NO: 26624 - DNA, 20 bp, synthetic construct
  source 1..20: mol_type = other DNA
ccgcttgactaccaccaggt

SEQ ID NO: 26625 - DNA, 20 bp, synthetic construct
  source 1..20: mol_type = other DNA
ctctgctaaccgcaacgccg

SEQ ID NO: 26626 - DNA, 20 bp, synthetic construct
  source 1..20: mol_type = other DNA
ccacgttcccccagaagcga

SEQ ID NO: 26627 - DNA, 20 bp, synthetic construct
  source 1..20: mol_type = other DNA
ccacgcttccgccgcagggc

SEQ ID NO: 26628 - DNA, 20 bp, synthetic construct
  source 1..20: mol_type = other DNA
accgcgaagagacgggaaat

SEQ ID NO: 26629 - DNA, 20 bp, synthetic construct
  source 1..20: mol_type = other DNA
tgtgtttatactacgagtat

SEQ ID NO: 26630 - DNA, 20 bp, synthetic construct
  source 1..20: mol_type = other DNA
agcgctaagcgctcgtgccc

SEQ ID NO: 26631 - DNA, 20 bp, synthetic construct
  source 1..20: mol_type = other DNA
tgctttcctagtaacaatgg

SEQ ID NO: 26632 - DNA, 20 bp, synthetic construct
  source 1..20: mol_type = other DNA
agtccactcatagaatatct

SEQ ID NO: 26633 - DNA, 20 bp, synthetic construct
  source 1..20: mol_type = other DNA
tgaaatgggacctcctgcag

SEQ ID NO: 26634 - DNA, 20 bp, synthetic construct
  source 1..20: mol_type = other DNA
gagatatgcgataactaagt

SEQ ID NO: 26635 - DNA, 20 bp, synthetic construct
  source 1..20: mol_type = other DNA
gtccctgctcgagtgtcggg

SEQ ID NO: 26636 - DNA, 20 bp, synthetic construct
  source 1..20: mol_type = other DNA
ggttggcgcgtgggtccggg

SEQ ID NO: 26637 - DNA, 20 bp, synthetic construct
  source 1..20: mol_type = other DNA
cggggtctggcactagtcac

SEQ ID NO: 26638 - DNA, 20 bp, synthetic construct
  source 1..20: mol_type = other DNA
ttatacgaacccactttatt

SEQ ID NO: 26639 - DNA, 20 bp, synthetic construct
  source 1..20: mol_type = other DNA
gacaggagtgcggactttga

SEQ ID NO: 26640 - DNA, 20 bp, synthetic construct
  source 1..20: mol_type = other DNA
tgataataattaccctgtct

SEQ ID NO: 26641 - DNA, 20 bp, synthetic construct
  source 1..20: mol_type = other DNA
tgtcgtagcgtaaaacccgc

SEQ ID NO: 26642 - DNA, 20 bp, synthetic construct
  source 1..20: mol_type = other DNA
agagaagccgtaaacgaagt

SEQ ID NO: 26643 - DNA, 20 bp, synthetic construct
  source 1..20: mol_type = other DNA
ttatgtttaacttcacgaaa

SEQ ID NO: 26644 - DNA, 20 bp, synthetic construct
  source 1..20: mol_type = other DNA
ggtaatagagttatatattt

SEQ ID NO: 26645 - DNA, 20 bp, synthetic construct
  source 1..20: mol_type = other DNA
tacatcataccagaatcacc

SEQ ID NO: 26646 - DNA, 20 bp, synthetic construct
  source 1..20: mol_type = other DNA
gccacgattttggctttggt

SEQ ID NO: 26647 - DNA, 20 bp, synthetic construct
  source 1..20: mol_type = other DNA
gataaggacaaagagcatac

SEQ ID NO: 26648 - DNA, 20 bp, synthetic construct
  source 1..20: mol_type = other DNA
gcgtgctaagataggtaaga

SEQ ID NO: 26649 - DNA, 20 bp, synthetic construct
  source 1..20: mol_type = other DNA
ctttgcaccggtgtcgttgt

SEQ ID NO: 26650 - DNA, 20 bp, synthetic construct
  source 1..20: mol_type = other DNA
ctacgcgggtttctggcgaa

SEQ ID NO: 26651 - DNA, 20 bp, synthetic construct
  source 1..20: mol_type = other DNA
ccatggattgggtggcccac

SEQ ID NO: 26652 - DNA, 20 bp, synthetic construct
  source 1..20: mol_type = other DNA
caagcgcgcagcagggatcc

SEQ ID NO: 26653 - DNA, 20 bp, synthetic construct
  source 1..20: mol_type = other DNA
gaaagtgtggtggtatacgt

SEQ ID NO: 26654 - DNA, 20 bp, synthetic construct
  source 1..20: mol_type = other DNA
acccccagctctgggggcga

SEQ ID NO: 26655 - DNA, 20 bp, synthetic construct
  source 1..20: mol_type = other DNA
aagttcggtgaggttgtact

SEQ ID NO: 26656 - DNA, 20 bp, synthetic construct
  source 1..20: mol_type = other DNA
gtatctagatgatcaagagg

SEQ ID NO: 26657 - DNA, 20 bp, synthetic construct
  source 1..20: mol_type = other DNA
tagttctagcgaaatcctga

SEQ ID NO: 26658 - DNA, 20 bp, synthetic construct
  source 1..20: mol_type = other DNA
aactaacagactcaaacaag

SEQ ID NO: 26659 - DNA, 20 bp, synthetic construct
  source 1..20: mol_type = other DNA
aaggtaccccattgtatggg

SEQ ID NO: 26660 - DNA, 20 bp, synthetic construct
  source 1..20: mol_type = other DNA
agttatttttatgtcataag

SEQ ID NO: 26661 - DNA, 20 bp, synthetic construct
  source 1..20: mol_type = other DNA
aaagcgaaagggaaaccaga

SEQ ID NO: 26662 - DNA, 20 bp, synthetic construct
  source 1..20: mol_type = other DNA
actcctgttgccgtttccct

SEQ ID NO: 26663 - DNA, 20 bp, synthetic construct
  source 1..20: mol_type = other DNA
acagtacccgaagatggcag

SEQ ID NO: 26664 - DNA, 20 bp, synthetic construct
  source 1..20: mol_type = other DNA
acagccgggacgccgaggcg

SEQ ID NO: 26665 - DNA, 20 bp, synthetic construct
  source 1..20: mol_type = other DNA
gcggatgaagaagaaaaccc

SEQ ID NO: 26666 - DNA, 20 bp, synthetic construct
  source 1..20: mol_type = other DNA
ccccctcgtccaagaatgca

SEQ ID NO: 26667 - DNA, 20 bp, synthetic construct
  source 1..20: mol_type = other DNA
ggatcctgaggaggcagctg

SEQ ID NO: 26668 - DNA, 20 bp, synthetic construct
  source 1..20: mol_type = other DNA
gggtggggagttggcccaga

SEQ ID NO: 26669 - DNA, 20 bp, synthetic construct
  source 1..20: mol_type = other DNA
gccttctcagccccgccagc

SEQ ID NO: 26670 - DNA, 20 bp, synthetic construct
  source 1..20: mol_type = other DNA
ctgcagcagcctgcctgcag

SEQ ID NO: 26671 - DNA, 20 bp, synthetic construct
  source 1..20: mol_type = other DNA
ttgagttggtgggggttttg

SEQ ID NO: 26672 - DNA, 20 bp, synthetic construct
  source 1..20: mol_type = other DNA
cgaacctgtgcggctgcagg

SEQ ID NO: 26673 - DNA, 20 bp, synthetic construct
  source 1..20: mol_type = other DNA
ttgtccccgggtcttccaac

SEQ ID NO: 26674 - DNA, 20 bp, synthetic construct
  source 1..20: mol_type = other DNA
ctttgggctcgggggctccc

SEQ ID NO: 26675 - DNA, 20 bp, synthetic construct
  source 1..20: mol_type = other DNA
aaggctctggatggtgtact

SEQ ID NO: 26676 - DNA, 20 bp, synthetic construct
  source 1..20: mol_type = other DNA
aggacatttaaagctaaatt

SEQ ID NO: 26677 - DNA, 20 bp, synthetic construct
  source 1..20: mol_type = other DNA
attacgccgcttttgaaaaa

SEQ ID NO: 26678 - DNA, 20 bp, synthetic construct
  source 1..20: mol_type = other DNA
agaatgtaaaagagccagag

SEQ ID NO: 26679 - DNA, 20 bp, synthetic construct
  source 1..20: mol_type = other DNA
ccacatccaggcagcgcagg

SEQ ID NO: 26680 - DNA, 20 bp, synthetic construct
  source 1..20: mol_type = other DNA
tgccgctgcgcagcagtatc

SEQ ID NO: 26681 - DNA, 20 bp, synthetic construct
  source 1..20: mol_type = other DNA
gatctacaatttgaagtact

SEQ ID NO: 26682 - DNA, 20 bp, synthetic construct
  source 1..20: mol_type = other DNA
ataggtgaccggaggccggc

SEQ ID NO: 26683 - DNA, 20 bp, synthetic construct
  source 1..20: mol_type = other DNA
aagccgtgtattcccccgca

SEQ ID NO: 26684 - DNA, 20 bp, synthetic construct
  source 1..20: mol_type = other DNA
gtgctaaaaaatcaaaaaac

SEQ ID NO: 26685 - DNA, 20 bp, synthetic construct
  source 1..20: mol_type = other DNA
cggagagctatcgtgctgag

SEQ ID NO: 26686 - DNA, 20 bp, synthetic construct
  source 1..20: mol_type = other DNA
caaaagaatggagagaacag

SEQ ID NO: 26687 - DNA, 20 bp, synthetic construct
  source 1..20: mol_type = other DNA
caggtagttggtctatcaac

SEQ ID NO: 26688 - DNA, 20 bp, synthetic construct
  source 1..20: mol_type = other DNA
ccctcttaccaattcaaggg

SEQ ID NO: 26689 - DNA, 20 bp, synthetic construct
  source 1..20: mol_type = other DNA
gtttgcgcttgtcggcatct

SEQ ID NO: 26690 - DNA, 20 bp, synthetic construct
  source 1..20: mol_type = other DNA
ccgcacgcacccaccgggac

SEQ ID NO: 26691 - DNA, 20 bp, synthetic construct
  source 1..20: mol_type = other DNA
taacagaaatggttccggag

SEQ ID NO: 26692 - DNA, 20 bp, synthetic construct
  source 1..20: mol_type = other DNA
tgaatgcatcctgtgcagcc

SEQ ID NO: 26693 - DNA, 20 bp, synthetic construct
  source 1..20: mol_type = other DNA
ttaatgcatcctgtgcagca

SEQ ID NO: 26694 - DNA, 20 bp, synthetic construct
  source 1..20: mol_type = other DNA
ccaaggccattagaagccaa

SEQ ID NO: 26695 - DNA, 20 bp, synthetic construct
  source 1..20: mol_type = other DNA
cgaggagatctggagctgct

SEQ ID NO: 26696 - DNA, 20 bp, synthetic construct
  source 1..20: mol_type = other DNA
actcgggtggtggccgctga

SEQ ID NO: 26697 - DNA, 20 bp, synthetic construct
  source 1..20: mol_type = other DNA
tctatagacgaacgtgtcat

SEQ ID NO: 26698 - DNA, 20 bp, synthetic construct
  source 1..20: mol_type = other DNA
gtacccccgtcgttggcgtg

SEQ ID NO: 26699 - DNA, 20 bp, synthetic construct
  source 1..20: mol_type = other DNA
agtccgggactttttgaagc

SEQ ID NO: 26700 - DNA, 20 bp, synthetic construct
  source 1..20: mol_type = other DNA
acgccactcgatctcgctcc

SEQ ID NO: 26701 - DNA, 20 bp, synthetic construct
  source 1..20: mol_type = other DNA
gaatattaataaatatcttc

SEQ ID NO: 26702 - DNA, 20 bp, synthetic construct
  source 1..20: mol_type = other DNA
atggcgggaccgtcgattcc

SEQ ID NO: 26703 - DNA, 20 bp, synthetic construct
  source 1..20: mol_type = other DNA
atggcgggaccgttgattcc

SEQ ID NO: 26704 - DNA, 20 bp, synthetic construct
  source 1..20: mol_type = other DNA
tagggactgttctcttcagt

SEQ ID NO: 26705 - DNA, 20 bp, synthetic construct
  source 1..20: mol_type = other DNA
cttgcacctattaaagaggg

SEQ ID NO: 26706 - DNA, 20 bp, synthetic construct
  source 1..20: mol_type = other DNA
tcgtcggaaacgagaagaca

SEQ ID NO: 26707 - DNA, 20 bp, synthetic construct
  source 1..20: mol_type = other DNA
cggttgctgcttgctgtcct

SEQ ID NO: 26708 - DNA, 20 bp, synthetic construct
  source 1..20: mol_type = other DNA
gctttggaagcagttagatc

SEQ ID NO: 26709 - DNA, 20 bp, synthetic construct
  source 1..20: mol_type = other DNA
atgcctacctgacctcccac

SEQ ID NO: 26710 - DNA, 20 bp, synthetic construct
  source 1..20: mol_type = other DNA
ttgcaaattatttaaaaggt

SEQ ID NO: 26711 - DNA, 20 bp, synthetic construct
  source 1..20: mol_type = other DNA
agaagccaagaggaccccgg

SEQ ID NO: 26712 - DNA, 20 bp, synthetic construct
  source 1..20: mol_type = other DNA
aaataagggtgcatgagggg

SEQ ID NO: 26713 - DNA, 20 bp, synthetic construct
  source 1..20: mol_type = other DNA
agcagatctgaggacatctc

SEQ ID NO: 26714 - DNA, 20 bp, synthetic construct
  source 1..20: mol_type = other DNA
tcgatatcgtcgatcccatt

SEQ ID NO: 26715 - DNA, 20 bp, synthetic construct
  source 1..20: mol_type = other DNA
atgtaaagacttgcagatga

SEQ ID NO: 26716 - DNA, 20 bp, synthetic construct
  source 1..20: mol_type = other DNA
ggctaaaacggtttccgccc

SEQ ID NO: 26717 - DNA, 20 bp, synthetic construct
  source 1..20: mol_type = other DNA
tgacaataacatattcatcc

SEQ ID NO: 26718 - DNA, 20 bp, synthetic construct
  source 1..20: mol_type = other DNA
acgagcaacaccggctcttt

SEQ ID NO: 26719 - DNA, 20 bp, synthetic construct
  source 1..20: mol_type = other DNA
gtacctttttgctcacacca

SEQ ID NO: 26720 - DNA, 20 bp, synthetic construct
  source 1..20: mol_type = other DNA
ttccgtgtagaagggcacac

SEQ ID NO: 26721 - DNA, 20 bp, synthetic construct
  source 1..20: mol_type = other DNA
ggttgaaggtatcttcagac

SEQ ID NO: 26722 - DNA, 20 bp, synthetic construct
  source 1..20: mol_type = other DNA
cgtgtgtcggtcgcctagtc

SEQ ID NO: 26723 - DNA, 20 bp, synthetic construct
  source 1..20: mol_type = other DNA
ttctatctatcccggccata

SEQ ID NO: 26724 - DNA, 20 bp, synthetic construct
  source 1..20: mol_type = other DNA
tatgactactgacaatctta

SEQ ID NO: 26725 - DNA, 20 bp, synthetic construct
  source 1..20: mol_type = other DNA
cagatggagaggagaaaacc

SEQ ID NO: 26726 - DNA, 20 bp, synthetic construct
  source 1..20: mol_type = other DNA
ccagcggtcataaaagaatt

SEQ ID NO: 26727 - DNA, 20 bp, synthetic construct
  source 1..20: mol_type = other DNA
ccccacgcactacgtgccgg

SEQ ID NO: 26728 - DNA, 20 bp, synthetic construct
  source 1..20: mol_type = other DNA
cagaagtttggacagctcaa

SEQ ID NO: 26729 - DNA, 20 bp, synthetic construct
  source 1..20: mol_type = other DNA
tggctcgggaggcaactcag

SEQ ID NO: 26730 - DNA, 20 bp, synthetic construct
  source 1..20: mol_type = other DNA
ctatccacgctatcattgct

SEQ ID NO: 26731 - DNA, 20 bp, synthetic construct
  source 1..20: mol_type = other DNA
acaaaagatatggacccgca

SEQ ID NO: 26732 - DNA, 20 bp, synthetic construct
  source 1..20: mol_type = other DNA
acatgtgtgaaaggcgagcc

SEQ ID NO: 26733 - DNA, 20 bp, synthetic construct
  source 1..20: mol_type = other DNA
tgtgcgaataactatgagga

SEQ ID NO: 26734 - DNA, 20 bp, synthetic construct
  source 1..20: mol_type = other DNA
gaagtagcagctcacacgcc

SEQ ID NO: 26735 - DNA, 20 bp, synthetic construct
  source 1..20: mol_type = other DNA
aagatgtcaatatgggtgca

SEQ ID NO: 26736 - DNA, 20 bp, synthetic construct
  source 1..20: mol_type = other DNA
cctttgggggctacctgtac

SEQ ID NO: 26737 - DNA, 20 bp, synthetic construct
  source 1..20: mol_type = other DNA
cccacgggggttacttgcac

SEQ ID NO: 26738 - DNA, 20 bp, synthetic construct
  source 1..20: mol_type = other DNA
gccaagtgtgtttgaagaac

SEQ ID NO: 26739 - DNA, 20 bp, synthetic construct
  source 1..20: mol_type = other DNA
tgcttctgattgtgaacgtt

SEQ ID NO: 26740 - DNA, 20 bp, synthetic construct
  source 1..20: mol_type = other DNA
gtccgtgtttcttttgttca

SEQ ID NO: 26741 - DNA, 20 bp, synthetic construct
  source 1..20: mol_type = other DNA
atccttgcgaccacgttggc

SEQ ID NO: 26742 - DNA, 20 bp, synthetic construct
  source 1..20: mol_type = other DNA
acgtggggagctcaactggt

SEQ ID NO: 26743 - DNA, 20 bp, synthetic construct
  source 1..20: mol_type = other DNA
ggtgttcgggtatgaggctg

SEQ ID NO: 26744 - DNA, 20 bp, synthetic construct
  source 1..20: mol_type = other DNA
ttcacgctcaccgtgcccag

SEQ ID NO: 26745 - DNA, 20 bp, synthetic construct
  source 1..20: mol_type = other DNA
aaaaaccttaaaggctggtc

SEQ ID NO: 26746 - DNA, 20 bp, synthetic construct
  source 1..20: mol_type = other DNA
tgtgtcaagctttcaggtag

SEQ ID NO: 26747 - DNA, 20 bp, synthetic construct
  source 1..20: mol_type = other DNA
aaatcatggcgtcccaaggc

SEQ ID NO: 26748 - DNA, 20 bp, synthetic construct
  source 1..20: mol_type = other DNA
gacaatgcttcaacccgatg

SEQ ID NO: 26749 - DNA, 20 bp, synthetic construct
  source 1..20: mol_type = other DNA
tcagctaggacaacaacagc

SEQ ID NO: 26750 - DNA, 20 bp, synthetic construct
  source 1..20: mol_type = other DNA
gggcgagcatcgggtcatcg

SEQ ID NO: 26751 - DNA, 20 bp, synthetic construct
  source 1..20: mol_type = other DNA
agactctgaggcaggacagg

SEQ ID NO: 26752 - DNA, 20 bp, synthetic construct
  source 1..20: mol_type = other DNA
gcagttccgctggctagtgt

SEQ ID NO: 26753 - DNA, 20 bp, synthetic construct
  source 1..20: mol_type = other DNA
caatgatctggagtgtcccg

SEQ ID NO: 26754 - DNA, 20 bp, synthetic construct
  source 1..20: mol_type = other DNA
ggaagcaaattggaaatgac

SEQ ID NO: 26755 - DNA, 20 bp, synthetic construct
  source 1..20: mol_type = other DNA
ggatcaacgtggaccgcatt

SEQ ID NO: 26756 - DNA, 20 bp, synthetic construct
  source 1..20: mol_type = other DNA
acggctggatgggacactag

SEQ ID NO: 26757 - DNA, 20 bp, synthetic construct
  source 1..20: mol_type = other DNA
gccggcggtgctccttctgc

SEQ ID NO: 26758 - DNA, 20 bp, synthetic construct
  source 1..20: mol_type = other DNA
gtagtggtaagaaagcgcca

SEQ ID NO: 26759 - DNA, 20 bp, synthetic construct
  source 1..20: mol_type = other DNA
tggatccactactctcgact

SEQ ID NO: 26760 - DNA, 20 bp, synthetic construct
  source 1..20: mol_type = other DNA
gcagcctagcactagaaggc

SEQ ID NO: 26761 - DNA, 20 bp, synthetic construct
  source 1..20: mol_type = other DNA
ctcggtgcgcttgtcatttc

SEQ ID NO: 26762 - DNA, 20 bp, synthetic construct
  source 1..20: mol_type = other DNA
gcgctagcgatacgctcgac

SEQ ID NO: 26763 - DNA, 20 bp, synthetic construct
  source 1..20: mol_type = other DNA
ctcgatatcttcgacgatag

SEQ ID NO: 26764 - DNA, 20 bp, synthetic construct
  source 1..20: mol_type = other DNA
cagagtcgcaattgacaata

SEQ ID NO: 26765 - DNA, 20 bp, synthetic construct
  source 1..20: mol_type = other DNA
agtgcggatttctatcgaag

SEQ ID NO: 26766 - DNA, 20 bp, synthetic construct
  source 1..20: mol_type = other DNA
ggactgctctgccggggcgg

SEQ ID NO: 26767 - DNA, 20 bp, synthetic construct
  source 1..20: mol_type = other DNA
gagtcgcgggacccccggtt

SEQ ID NO: 26768 - DNA, 20 bp, synthetic construct
  source 1..20: mol_type = other DNA
ccgttctctgtgggctcaaa

SEQ ID NO: 26769 - DNA, 20 bp, synthetic construct
  source 1..20: mol_type = other DNA
gcatagtctcgccgcgcgtc

SEQ ID NO: 26770 - DNA, 20 bp, synthetic construct
  source 1..20: mol_type = other DNA
cgaatcaaccctatctactg

SEQ ID NO: 26771 - DNA, 20 bp, synthetic construct
  source 1..20: mol_type = other DNA
ttctgtcatttgtctgttca

SEQ ID NO: 26772 - DNA, 20 bp, synthetic construct
  source 1..20: mol_type = other DNA
ataccaaacttcgacgcaat

SEQ ID NO: 26773 - DNA, 20 bp, synthetic construct
  source 1..20: mol_type = other DNA
acgtggttgctggtcaggaa

SEQ ID NO: 26774 - DNA, 20 bp, synthetic construct
  source 1..20: mol_type = other DNA
gtatccaataaaccctcttg

SEQ ID NO: 26775 - DNA, 20 bp, synthetic construct
  source 1..20: mol_type = other DNA
tgataatctcgcggtggaga

SEQ ID NO: 26776 - DNA, 20 bp, synthetic construct
  source 1..20: mol_type = other DNA
tctttcttggtttggtgctt

SEQ ID NO: 26777 - DNA, 20 bp, synthetic construct
  source 1..20: mol_type = other DNA
gtcgcgccgcgcgttctttc

SEQ ID NO: 26778 - DNA, 20 bp, synthetic construct
  source 1..20: mol_type = other DNA
ccccaaaccaagtggtcttg

SEQ ID NO: 26779 - DNA, 20 bp, synthetic construct
  source 1..20: mol_type = other DNA
cggaggctctcttcagtaaa

SEQ ID NO: 26780 - DNA, 20 bp, synthetic construct
  source 1..20: mol_type = other DNA
acatggacgaaccctggccc

SEQ ID NO: 26781 - DNA, 20 bp, synthetic construct
  source 1..20: mol_type = other DNA
aatttccaccaagtggagac

SEQ ID NO: 26782 - DNA, 20 bp, synthetic construct
  source 1..20: mol_type = other DNA
attctcggtatccatgtcgc

SEQ ID NO: 26783 - DNA, 20 bp, synthetic construct
  source 1..20: mol_type = other DNA
tcccctgcctttggcgcctt

SEQ ID NO: 26784 - DNA, 20 bp, synthetic construct
  source 1..20: mol_type = other DNA
cttcgcacaccgcgacgctc

SEQ ID NO: 26785 - DNA, 20 bp, synthetic construct
  source 1..20: mol_type = other DNA
catcacccagggcacgatcc

SEQ ID NO: 26786 - DNA, 20 bp, synthetic construct
  source 1..20: mol_type = other DNA
gggtgctggtcaccggggca

SEQ ID NO: 26787 - DNA, 20 bp, synthetic construct
  source 1..20: mol_type = other DNA
gccggttgctgagccgggag

SEQ ID NO: 26788 - DNA, 20 bp, synthetic construct
  source 1..20: mol_type = other DNA
aacatggacttcccgtgcct

SEQ ID NO: 26789 - DNA, 20 bp, synthetic construct
  source 1..20: mol_type = other DNA
atggacgtatctagtggttc

SEQ ID NO: 26790 - DNA, 20 bp, synthetic construct
  source 1..20: mol_type = other DNA
agacggcagcgaactcgtcg

SEQ ID NO: 26791 - DNA, 20 bp, synthetic construct
  source 1..20: mol_type = other DNA
ctacagcgggggagacattt

SEQ ID NO: 26792 - DNA, 20 bp, synthetic construct
  source 1..20: mol_type = other DNA
tcatcaacacaattttgaat

SEQ ID NO: 26793 - DNA, 20 bp, synthetic construct
  source 1..20: mol_type = other DNA
tccgcgtcgctagctagtcg

SEQ ID NO: 26794 - DNA, 20 bp, synthetic construct
  source 1..20: mol_type = other DNA
ccgtaccctaagatacgggg

SEQ ID NO: 26795 - DNA, 20 bp, synthetic construct
  source 1..20: mol_type = other DNA
agaataaatttgcaggtcaa

SEQ ID NO: 26796 - DNA, 20 bp, synthetic construct
  source 1..20: mol_type = other DNA
tatctcttgctggaaaaatc

SEQ ID NO: 26797 - DNA, 20 bp, synthetic construct
  source 1..20: mol_type = other DNA
cacgcgcttttgtatcagag

SEQ ID NO: 26798 - DNA, 20 bp, synthetic construct
  source 1..20: mol_type = other DNA
ttccccatccccttcccaac

SEQ ID NO: 26799 - DNA, 20 bp, synthetic construct
  source 1..20: mol_type = other DNA
cgcgcgcctttgtctcagag

SEQ ID NO: 26800 - DNA, 20 bp, synthetic construct
  source 1..20: mol_type = other DNA
gaactctgcaatttattgag

SEQ ID NO: 26801 - DNA, 20 bp, synthetic construct
  source 1..20: mol_type = other DNA
cccttgcgagtgaacaccac

SEQ ID NO: 26802 - DNA, 20 bp, synthetic construct
  source 1..20: mol_type = other DNA
gcctgtctggccctgttgct

SEQ ID NO: 26803 - DNA, 20 bp, synthetic construct
  source 1..20: mol_type = other DNA
cagcttaatcaactgacccg

SEQ ID NO: 26804 - DNA, 20 bp, synthetic construct
  source 1..20: mol_type = other DNA
cgctgtctccctggagttct

SEQ ID NO: 26805 - DNA, 20 bp, synthetic construct
  source 1..20: mol_type = other DNA
ttccagcagttggggccacg

SEQ ID NO: 26806 - DNA, 20 bp, synthetic construct
  source 1..20: mol_type = other DNA
gggagagttgggagagtaaa

SEQ ID NO: 26807 - DNA, 20 bp, synthetic construct
  source 1..20: mol_type = other DNA
ggatctggataaagatacat

SEQ ID NO: 26808 - DNA, 20 bp, synthetic construct
  source 1..20: mol_type = other DNA
gcctaaaagagcaaggacta

SEQ ID NO: 26809 - DNA, 20 bp, synthetic construct
  source 1..20: mol_type = other DNA
attttccggcccaggctaag

SEQ ID NO: 26810 - DNA, 20 bp, synthetic construct
  source 1..20: mol_type = other DNA
aagagtgtgttctgccaggg

SEQ ID NO: 26811 - DNA, 20 bp, synthetic construct
  source 1..20: mol_type = other DNA
gaagggctattgcaacaccc

SEQ ID NO: 26812 - DNA, 20 bp, synthetic construct
  source 1..20: mol_type = other DNA
gctgttccagtcaacgctag

SEQ ID NO: 26813 - DNA, 20 bp, synthetic construct
  source 1..20: mol_type = other DNA
gcaatctcggctgtctgtac

SEQ ID NO: 26814 - DNA, 20 bp, synthetic construct
  source 1..20: mol_type = other DNA
caggaaatttcctcctccta

SEQ ID NO: 26815 - DNA, 20 bp, synthetic construct
  source 1..20: mol_type = other DNA
cctggatctgtctgacagcg

SEQ ID NO: 26816 - DNA, 20 bp, synthetic construct
  source 1..20: mol_type = other DNA
ggcctagggctccgcttgac

SEQ ID NO: 26817 - DNA, 20 bp, synthetic construct
  source 1..20: mol_type = other DNA
acagtgacaggtatcttttt

SEQ ID NO: 26818 - DNA, 20 bp, synthetic construct
  source 1..20: mol_type = other DNA
ccctgtattaatatggggac

SEQ ID NO: 26819 - DNA, 20 bp, synthetic construct
  source 1..20: mol_type = other DNA
ttctgctacgtcattaccag

SEQ ID NO: 26820 - DNA, 20 bp, synthetic construct
  source 1..20: mol_type = other DNA
agtagcaagaccgggaatag

SEQ ID NO: 26821 - DNA, 20 bp, synthetic construct
  source 1..20: mol_type = other DNA
atctctagcatgaccagacc

SEQ ID NO: 26822 - DNA, 20 bp, synthetic construct
  source 1..20: mol_type = other DNA
tggagacaacatgtggttct

SEQ ID NO: 26823 - DNA, 20 bp, synthetic construct
  source 1..20: mol_type = other DNA
tcagtctgtgtttactctca

SEQ ID NO: 26824 - DNA, 20 bp, synthetic construct
  source 1..20: mol_type = other DNA
cgcgcacctcatggttccgg

SEQ ID NO: 26825 - DNA, 20 bp, synthetic construct
  source 1..20: mol_type = other DNA
gtggcgtagtactctggtat

SEQ ID NO: 26826 - DNA, 20 bp, synthetic construct
  source 1..20: mol_type = other DNA
aaaatcctccctgagagagc

SEQ ID NO: 26827 - DNA, 20 bp, synthetic construct
  source 1..20: mol_type = other DNA
gtggcgtagtacttggtatt

SEQ ID NO: 26828 - DNA, 20 bp, synthetic construct
  source 1..20: mol_type = other DNA
tgggcgctagcactctgatt

SEQ ID NO: 26829 - DNA, 20 bp, synthetic construct
  source 1..20: mol_type = other DNA
tgggcgctagtacactgata

SEQ ID NO: 26830 - DNA, 20 bp, synthetic construct
  source 1..20: mol_type = other DNA
gggcgctagcactctggtat

SEQ ID NO: 26831 - DNA, 20 bp, synthetic construct
  source 1..20: mol_type = other DNA
tgggcgctagtacactggta

SEQ ID NO: 26832 - DNA, 20 bp, synthetic construct
  source 1..20: mol_type = other DNA
gtgaggattaacaacaatta

SEQ ID NO: 26833 - DNA, 20 bp, synthetic construct
  source 1..20: mol_type = other DNA
ttccctccacccgcagtaac

SEQ ID NO: 26834 - DNA, 20 bp, synthetic construct
  source 1..20: mol_type = other DNA
tcacgcgttgtcgcgagctc

SEQ ID NO: 26835 - DNA, 20 bp, synthetic construct
  source 1..20: mol_type = other DNA
ttcgtctccgatgattatga

SEQ ID NO: 26836 - DNA, 20 bp, synthetic construct
  source 1..20: mol_type = other DNA
tcctcctcgcccccacccag

SEQ ID NO: 26837 - DNA, 20 bp, synthetic construct
  source 1..20: mol_type = other DNA
agagatttgaacatgagtat

SEQ ID NO: 26838 - DNA, 20 bp, synthetic construct
  source 1..20: mol_type = other DNA
gtggcggctagtactccggt

SEQ ID NO: 26839 - DNA, 20 bp, synthetic construct
  source 1..20: mol_type = other DNA
ggtcccctccacggaggacc

SEQ ID NO: 26840 - DNA, 20 bp, synthetic construct
  source 1..20: mol_type = other DNA
aatgttcatttcaagccgac

SEQ ID NO: 26841 - DNA, 20 bp, synthetic construct
  source 1..20: mol_type = other DNA
gtcaccgaaataaattcgca

SEQ ID NO: 26842 - DNA, 20 bp, synthetic construct
  source 1..20: mol_type = other DNA
ggagtggtagtgggggctgc

SEQ ID NO: 26843 - DNA, 20 bp, synthetic construct
  source 1..20: mol_type = other DNA
gagtcgcggctggccgactc

SEQ ID NO: 26844 - DNA, 20 bp, synthetic construct
  source 1..20: mol_type = other DNA
tcctgggaatcttcaatcat

SEQ ID NO: 26845 - DNA, 20 bp, synthetic construct
  source 1..20: mol_type = other DNA
ggagcaggacccataaggtt

SEQ ID NO: 26846 - DNA, 20 bp, synthetic construct
  source 1..20: mol_type = other DNA
tacttcattctgcactcaaa

SEQ ID NO: 26847 - DNA, 20 bp, synthetic construct
  source 1..20: mol_type = other DNA
gagcaactctattctagatc

SEQ ID NO: 26848 - DNA, 20 bp, synthetic construct
  source 1..20: mol_type = other DNA
tgtcattttggcagatagtc

SEQ ID NO: 26849 - DNA, 20 bp, synthetic construct
  source 1..20: mol_type = other DNA
aagttttcgacgtggtcaga

SEQ ID NO: 26850 - DNA, 20 bp, synthetic construct
  source 1..20: mol_type = other DNA
gtcacgaaggggagggaata

SEQ ID NO: 26851 - DNA, 20 bp, synthetic construct
  source 1..20: mol_type = other DNA
gtgggtggctgcccagctcg

SEQ ID NO: 26852 - DNA, 20 bp, synthetic construct
  source 1..20: mol_type = other DNA
tcttctcgactgactccatg

SEQ ID NO: 26853 - DNA, 20 bp, synthetic construct
  source 1..20: mol_type = other DNA
cgccactcttgggagaggaa

SEQ ID NO: 26854 - DNA, 20 bp, synthetic construct
  source 1..20: mol_type = other DNA
gggatgtcaaattcctggtc

SEQ ID NO: 26855 - DNA, 20 bp, synthetic construct
  source 1..20: mol_type = other DNA
ccacgggacgctagttgtga

SEQ ID NO: 26856 - DNA, 20 bp, synthetic construct
  source 1..20: mol_type = other DNA
gcgtcggagggagctctact

SEQ ID NO: 26857 - DNA, 20 bp, synthetic construct
  source 1..20: mol_type = other DNA
ggccacaatctttttgatct

SEQ ID NO: 26858 - DNA, 20 bp, synthetic construct
  source 1..20: mol_type = other DNA
cacagttgccgcggacggag

SEQ ID NO: 26859 - DNA, 20 bp, synthetic construct
  source 1..20: mol_type = other DNA
gacagctcctgcgctgcact

SEQ ID NO: 26860 - DNA, 20 bp, synthetic construct
  source 1..20: mol_type = other DNA
cgaccgtccctgcgactcac

SEQ ID NO: 26861 - DNA, 20 bp, synthetic construct
  source 1..20: mol_type = other DNA
gcagtccctgcgatacactc

SEQ ID NO: 26862 - DNA, 20 bp, synthetic construct
  source 1..20: mol_type = other DNA
cccttcattgtccccatggc

SEQ ID NO: 26863 - DNA, 20 bp, synthetic construct
  source 1..20: mol_type = other DNA
gagcgtcatctaataaagat

SEQ ID NO: 26864 - DNA, 20 bp, synthetic construct
  source 1..20: mol_type = other DNA
ttttccggtggccacccgcc

SEQ ID NO: 26865 - DNA, 20 bp, synthetic construct
  source 1..20: mol_type = other DNA
cggggccgggcaagtttgtt

SEQ ID NO: 26866 - DNA, 20 bp, synthetic construct
  source 1..20: mol_type = other DNA
ctgatccgaggctggagcca

SEQ ID NO: 26867 - DNA, 20 bp, synthetic construct
  source 1..20: mol_type = other DNA
aaggtctcgagatgccacgt

SEQ ID NO: 26868 - DNA, 20 bp, synthetic construct
  source 1..20: mol_type = other DNA
aatcaagtcatcgagatttc

SEQ ID NO: 26869 - DNA, 20 bp, synthetic construct
  source 1..20: mol_type = other DNA
gtctggcgatggttatggtc

SEQ ID NO: 26870 - DNA, 20 bp, synthetic construct
  source 1..20: mol_type = other DNA
gttctggaagacaataaccc

SEQ ID NO: 26871 - DNA, 20 bp, synthetic construct
  source 1..20: mol_type = other DNA
atgtgtatcccagaagaagc

SEQ ID NO: 26872 - DNA, 20 bp, synthetic construct
  source 1..20: mol_type = other DNA
cggaagcttgcttaacgtag

SEQ ID NO: 26873 - DNA, 20 bp, synthetic construct
  source 1..20: mol_type = other DNA
tcggagattcgcccgggccc

SEQ ID NO: 26874 - DNA, 20 bp, synthetic construct
  source 1..20: mol_type = other DNA
ttaaacttaagcgcgccgtg

SEQ ID NO: 26875 - DNA, 20 bp, synthetic construct
  source 1..20: mol_type = other DNA
cgcgtgaggctgcggctctg

SEQ ID NO: 26876 - DNA, 20 bp, synthetic construct
  source 1..20: mol_type = other DNA
gcagcgaccaacgcttctct

SEQ ID NO: 26877 - DNA, 20 bp, synthetic construct
  source 1..20: mol_type = other DNA
cagagggccagtacgtttcg

SEQ ID NO: 26878 - DNA, 20 bp, synthetic construct
  source 1..20: mol_type = other DNA
gaggcccactattaggctag

SEQ ID NO: 26879 - DNA, 20 bp, synthetic construct
  source 1..20: mol_type = other DNA
ataccgcaaccaaaatatcg

SEQ ID NO: 26880 - DNA, 20 bp, synthetic construct
  source 1..20: mol_type = other DNA
cagcgagtagagttttctct

SEQ ID NO: 26881 - DNA, 20 bp, synthetic construct
  source 1..20: mol_type = other DNA
tgcggacgcagttgcgtgag

SEQ ID NO: 26882 - DNA, 20 bp, synthetic construct
  source 1..20: mol_type = other DNA
ggaactctccagtttgtgga

SEQ ID NO: 26883 - DNA, 20 bp, synthetic construct
  source 1..20: mol_type = other DNA
gatagggtgcttgcgagtgc

SEQ ID NO: 26884 - DNA, 20 bp, synthetic construct
  source 1..20: mol_type = other DNA
accaaccgcaatggacccag

SEQ ID NO: 26885 - DNA, 20 bp, synthetic construct
  source 1..20: mol_type = other DNA
acgcagatctgtttgtcacg

SEQ ID NO: 26886 - DNA, 20 bp, synthetic construct
  source 1..20: mol_type = other DNA
tcgtcaaccgatgagatagg

SEQ ID NO: 26887 - DNA, 20 bp, synthetic construct
  source 1..20: mol_type = other DNA
aggagaagttgatttccgtg

SEQ ID NO: 26888 - DNA, 20 bp, synthetic construct
  source 1..20: mol_type = other DNA
ggggcgcgggtcactgaccc

SEQ ID NO: 26889 - DNA, 20 bp, synthetic construct
  source 1..20: mol_type = other DNA
tggacatccttaggcaaaac

SEQ ID NO: 26890 - DNA, 20 bp, synthetic construct
  source 1..20: mol_type = other DNA
agcagcagggacttaacttc

SEQ ID NO: 26891 - DNA, 20 bp, synthetic construct
  source 1..20: mol_type = other DNA
cgggggctgtagctgggttt

SEQ ID NO: 26892 - DNA, 20 bp, synthetic construct
  source 1..20: mol_type = other DNA
ccccaggctacctgacgggg

SEQ ID NO: 26893 - DNA, 20 bp, synthetic construct
  source 1..20: mol_type = other DNA
ggcggcggcagtactgggac

SEQ ID NO: 26894 - DNA, 20 bp, synthetic construct
  source 1..20: mol_type = other DNA
ctgcggtctggccttggagg

SEQ ID NO: 26895 - DNA, 20 bp, synthetic construct
  source 1..20: mol_type = other DNA
ctggggtccgacctggaagg

SEQ ID NO: 26896 - DNA, 20 bp, synthetic construct
  source 1..20: mol_type = other DNA
cctccaaagaaggaagcatc

SEQ ID NO: 26897 - DNA, 20 bp, synthetic construct
  source 1..20: mol_type = other DNA
agggcgtggtctaccaagaa

SEQ ID NO: 26898 - DNA, 20 bp, synthetic construct
  source 1..20: mol_type = other DNA
gatctcactccattgaacgt

SEQ ID NO: 26899 - DNA, 20 bp, synthetic construct
  source 1..20: mol_type = other DNA
ccttggttgatgccattgtc

SEQ ID NO: 26900 - DNA, 20 bp, synthetic construct
  source 1..20: mol_type = other DNA
caacatgatatatttgtcct

SEQ ID NO: 26901 - DNA, 20 bp, synthetic construct
  source 1..20: mol_type = other DNA
tttgaacttttatacaaaac

SEQ ID NO: 26902 - DNA, 20 bp, synthetic construct
  source 1..20: mol_type = other DNA
ttcaattgtggctttgacgt

SEQ ID NO: 26903 - DNA, 20 bp, synthetic construct
  source 1..20: mol_type = other DNA
ccgtggaccctctggtataa

SEQ ID NO: 26904 - DNA, 20 bp, synthetic construct
  source 1..20: mol_type = other DNA
agggactccagaccttccta

SEQ ID NO: 26905 - DNA, 20 bp, synthetic construct
  source 1..20: mol_type = other DNA
accaacacacactcgacgtg

SEQ ID NO: 26906 - DNA, 20 bp, synthetic construct
  source 1..20: mol_type = other DNA
ccaagaggcaaagttgtgga

SEQ ID NO: 26907 - DNA, 20 bp, synthetic construct
  source 1..20: mol_type = other DNA
agtccaaagtggaccaggcc

SEQ ID NO: 26908 - DNA, 20 bp, synthetic construct
  source 1..20: mol_type = other DNA
atatgacgcttgtttctttt

SEQ ID NO: 26909 - DNA, 20 bp, synthetic construct
  source 1..20: mol_type = other DNA
cggctagtaatgattctgga

SEQ ID NO: 26910 - DNA, 20 bp, synthetic construct
  source 1..20: mol_type = other DNA
gaggtgactgacagttacga

SEQ ID NO: 26911 - DNA, 20 bp, synthetic construct
  source 1..20: mol_type = other DNA
attgggtgcgcgactcggtt

SEQ ID NO: 26912 - DNA, 20 bp, synthetic construct
  source 1..20: mol_type = other DNA
cacgtaaaggctgccgacac

SEQ ID NO: 26913 - DNA, 20 bp, synthetic construct
  source 1..20: mol_type = other DNA
cagattctgctctgagtgtg

SEQ ID NO: 26914 - DNA, 20 bp, synthetic construct
  source 1..20: mol_type = other DNA
accgtggaacatctcgagaa

SEQ ID NO: 26915 - DNA, 20 bp, synthetic construct
  source 1..20: mol_type = other DNA
ccatcatcaacaccatcatc

SEQ ID NO: 26916 - DNA, 20 bp, synthetic construct
  source 1..20: mol_type = other DNA
tgcaatggcaacccagtcgc

SEQ ID NO: 26917 - DNA, 20 bp, synthetic construct
  source 1..20: mol_type = other DNA
caaggggagaagaaggaaga

SEQ ID NO: 26918 - DNA, 20 bp, synthetic construct
  source 1..20: mol_type = other DNA
aagaaggctttacccacttc

SEQ ID NO: 26919 - DNA, 20 bp, synthetic construct
  source 1..20: mol_type = other DNA
gtaggggaagcccccactat

SEQ ID NO: 26920 - DNA, 20 bp, synthetic construct
  source 1..20: mol_type = other DNA
cctccgcggctggccattgt

SEQ ID NO: 26921 - DNA, 20 bp, synthetic construct
  source 1..20: mol_type = other DNA
ggacctgttgggaacagatg

SEQ ID NO: 26922 - DNA, 20 bp, synthetic construct
  source 1..20: mol_type = other DNA
caaagttggcgttttattat

SEQ ID NO: 26923 - DNA, 20 bp, synthetic construct
  source 1..20: mol_type = other DNA
tgacaaggagagaagtccac

SEQ ID NO: 26924 - DNA, 20 bp, synthetic construct
  source 1..20: mol_type = other DNA
ctggtttgtttccccggtgc

SEQ ID NO: 26925 - DNA, 20 bp, synthetic construct
  source 1..20: mol_type = other DNA
gagaacagagtatcgttctg

SEQ ID NO: 26926 - DNA, 20 bp, synthetic construct
  source 1..20: mol_type = other DNA
aagtcgaaaggttaaaacat

SEQ ID NO: 26927 - DNA, 20 bp, synthetic construct
  source 1..20: mol_type = other DNA
agcaaaatgggtgtttattt

SEQ ID NO: 26928 - DNA, 20 bp, synthetic construct
  source 1..20: mol_type = other DNA
gggtaagaactgagggggca

SEQ ID NO: 26929 - DNA, 20 bp, synthetic construct
  source 1..20: mol_type = other DNA
cagaacggcggagacccagg

SEQ ID NO: 26930 - DNA, 20 bp, synthetic construct
  source 1..20: mol_type = other DNA
ggcctccttcttgataaagt

SEQ ID NO: 26931 - DNA, 20 bp, synthetic construct
  source 1..20: mol_type = other DNA
ttcgtggaacgttgttcccg

SEQ ID NO: 26932 - DNA, 20 bp, synthetic construct
  source 1..20: mol_type = other DNA
atagatgaaatagcaggagg

SEQ ID NO: 26933 - DNA, 20 bp, synthetic construct
  source 1..20: mol_type = other DNA
aggcagcgactgtgattgtg

SEQ ID NO: 26934 - DNA, 20 bp, synthetic construct
  source 1..20: mol_type = other DNA
ttctgtgtttttacgtaggt

SEQ ID NO: 26935 - DNA, 20 bp, synthetic construct
  source 1..20: mol_type = other DNA
tttccttctttcttacctta

SEQ ID NO: 26936 - DNA, 20 bp, synthetic construct
  source 1..20: mol_type = other DNA
ctcgaaagcgaaagttccag

SEQ ID NO: 26937 - DNA, 20 bp, synthetic construct
  source 1..20: mol_type = other DNA
gcgaaagcgaaagtagaacc

SEQ ID NO: 26938 - DNA, 20 bp, synthetic construct
  source 1..20: mol_type = other DNA
tcgaaagcgaaagtgttcca

SEQ ID NO: 26939 - DNA, 20 bp, synthetic construct
  source 1..20: mol_type = other DNA
ttgaaagcgaaagttccaga

SEQ ID NO: 26940 - DNA, 20 bp, synthetic construct
  source 1..20: mol_type = other DNA
ttgaaagcgacagtagaacc

SEQ ID NO: 26941 - DNA, 20 bp, synthetic construct
  source 1..20: mol_type = other DNA
gagaaagcgaaagtagaacc

SEQ ID NO: 26942 - DNA, 20 bp, synthetic construct
  source 1..20: mol_type = other DNA
ggaaagcgaaagagaaacca

SEQ ID NO: 26943 - DNA, 20 bp, synthetic construct
  source 1..20: mol_type = other DNA
tgaaagcgaaagtaccagag

SEQ ID NO: 26944 - DNA, 20 bp, synthetic construct
  source 1..20: mol_type = other DNA
cgaaagcgaaagtagaacca

SEQ ID NO: 26945 - DNA, 20 bp, synthetic construct
  source 1..20: mol_type = other DNA
cgaaagcgaaagttccagag

SEQ ID NO: 26946 - DNA, 20 bp, synthetic construct
  source 1..20: mol_type = other DNA
ggaaaagcgaaagtaaaacc

SEQ ID NO: 26947 - DNA, 20 bp, synthetic construct
  source 1..20: mol_type = other DNA
tgaaagcgaaagagaaacca

SEQ ID NO: 26948 - DNA, 20 bp, synthetic construct
  source 1..20: mol_type = other DNA
tgaaagtgaaagtagaacca

SEQ ID NO: 26949 - DNA, 20 bp, synthetic construct
  source 1..20: mol_type = other DNA
ctcgaaagcggaagttccca

SEQ ID NO: 26950 - DNA, 20 bp, synthetic construct
  source 1..20: mol_type = other DNA
gtaaaaatctctagcagtgg

SEQ ID NO: 26951 - DNA, 20 bp, synthetic construct
  source 1..20: mol_type = other DNA
ataaaaatctctagcagtgg

SEQ ID NO: 26952 - DNA, 20 bp, synthetic construct
  source 1..20: mol_type = other DNA
gtaaaattctctagcagtgg

SEQ ID NO: 26953 - DNA, 20 bp, synthetic construct
  source 1..20: mol_type = other DNA
gaaagcgaaagtagaaccag

SEQ ID NO: 26954 - DNA, 20 bp, synthetic construct
  source 1..20: mol_type = other DNA
gaaagcgaaagtaaaaccag

SEQ ID NO: 26955 - DNA, 20 bp, synthetic construct
  source 1..20: mol_type = other DNA
gaaagcgaaagtaagaccag

SEQ ID NO: 26956 - DNA, 20 bp, synthetic construct
  source 1..20: mol_type = other DNA
gaaaacgaaagtaaaaccag

SEQ ID NO: 26957 - DNA, 20 bp, synthetic construct
  source 1..20: mol_type = other DNA
gaaagcgaaagagaaaccag

SEQ ID NO: 26958 - DNA, 20 bp, synthetic construct
  source 1..20: mol_type = other DNA
gaaagcgaaagtgagaccag

SEQ ID NO: 26959 - DNA, 20 bp, synthetic construct
  source 1..20: mol_type = other DNA
gaaaacgaaagtaaactgga

SEQ ID NO: 26960 - DNA, 20 bp, synthetic construct
  source 1..20: mol_type = other DNA
gaaaacgaaagtagaaccag

SEQ ID NO: 26961 - DNA, 20 bp, synthetic construct
  source 1..20: mol_type = other DNA
gaaaacgaaagtagaaccgg

SEQ ID NO: 26962 - DNA, 20 bp, synthetic construct
  source 1..20: mol_type = other DNA
gaaagcgaaagtagaaccgg

SEQ ID NO: 26963 - DNA, 20 bp, synthetic construct
  source 1..20: mol_type = other DNA
gaaaaggaaaatgagacccg

SEQ ID NO: 26964 - DNA, 20 bp, synthetic construct
  source 1..20: mol_type = other DNA
gaaaacgaaagcggaaccgg

SEQ ID NO: 26965 - DNA, 20 bp, synthetic construct
  source 1..20: mol_type = other DNA
gaaagccaaagttagaaccc

SEQ ID NO: 26966 - DNA, 20 bp, synthetic construct
  source 1..20: mol_type = other DNA
aagaaaacctccgacgcaac

SEQ ID NO: 26967 - DNA, 20 bp, synthetic construct
  source 1..20: mol_type = other DNA
tcgaaagcgaaagttccaga

SEQ ID NO: 26968 - DNA, 20 bp, synthetic construct
  source 1..20: mol_type = other DNA
cgaaagcggaagttccagag

SEQ ID NO: 26969 - DNA, 20 bp, synthetic construct
  source 1..20: mol_type = other DNA
taaaaatctctagcagtggc

SEQ ID NO: 26970 - DNA, 20 bp, synthetic construct
  source 1..20: mol_type = other DNA
taaaaatctctaccagtggc

SEQ ID NO: 26971 - DNA, 20 bp, synthetic construct
  source 1..20: mol_type = other DNA
taaaaatctctagaagtggc

SEQ ID NO: 26972 - DNA, 20 bp, synthetic construct
  source 1..20: mol_type = other DNA
aatcaaaagaaggttgccaa

SEQ ID NO: 26973 - DNA, 20 bp, synthetic construct
  source 1..20: mol_type = other DNA
aaagcaaagaaggatgtcaa

SEQ ID NO: 26974 - DNA, 20 bp, synthetic construct
  source 1..20: mol_type = other DNA
aaagtaggaccagaggagat

SEQ ID NO: 26975 - DNA, 20 bp, synthetic construct
  source 1..20: mol_type = other DNA
ctcagacctctttagtccgg

SEQ ID NO: 26976 - DNA, 20 bp, synthetic construct
  source 1..20: mol_type = other DNA
ctcagatattaagtgtctgt

SEQ ID NO: 26977 - DNA, 20 bp, synthetic construct
  source 1..20: mol_type = other DNA
ctcagaccatctggactgag

SEQ ID NO: 26978 - DNA, 20 bp, synthetic construct
  source 1..20: mol_type = other DNA
aaagcgaaagtagaaccaga

SEQ ID NO: 26979 - DNA, 20 bp, synthetic construct
  source 1..20: mol_type = other DNA
aaagcgaaagtgagaccaga

SEQ ID NO: 26980 - DNA, 20 bp, synthetic construct
  source 1..20: mol_type = other DNA
aaagtgaaagtaagaccaga

SEQ ID NO: 26981 - DNA, 20 bp, synthetic construct
  source 1..20: mol_type = other DNA
aaaagcgaaagtaaaaccag

SEQ ID NO: 26982 - DNA, 20 bp, synthetic construct
  source 1..20: mol_type = other DNA
aaagcgaaagtaagaccaga

SEQ ID NO: 26983 - DNA, 20 bp, synthetic construct
  source 1..20: mol_type = other DNA
aaaagcgaaaataaaaccag

SEQ ID NO: 26984 - DNA, 20 bp, synthetic construct
  source 1..20: mol_type = other DNA
gaaagtgaaagagaaaccag

SEQ ID NO: 26985 - DNA, 20 bp, synthetic construct
  source 1..20: mol_type = other DNA
aaaacgaaagtaaggccaga

SEQ ID NO: 26986 - DNA, 20 bp, synthetic construct
  source 1..20: mol_type = other DNA
aaaacgaaagtgtaaccgga

SEQ ID NO: 26987 - DNA, 20 bp, synthetic construct
  source 1..20: mol_type = other DNA
aaagcgaaagagaaaccaga

SEQ ID NO: 26988 - DNA, 20 bp, synthetic construct
  source 1..20: mol_type = other DNA
aaagcgaaagtaaaaccaga

SEQ ID NO: 26989 - DNA, 20 bp, synthetic construct
  source 1..20: mol_type = other DNA
aagcgaaagcgaaagccaga

SEQ ID NO: 26990 - DNA, 20 bp, synthetic construct
  source 1..20: mol_type = other DNA
agatcacttagactgaagca

SEQ ID NO: 26991 - DNA, 20 bp, synthetic construct
  source 1..20: mol_type = other DNA
ctcaaacccttttagtcagt

SEQ ID NO: 26992 - DNA, 20 bp, synthetic construct
  source 1..20: mol_type = other DNA
ctcagaccattctagtcagt

SEQ ID NO: 26993 - DNA, 20 bp, synthetic construct
  source 1..20: mol_type = other DNA
actgtctgcgtcatttggtg

SEQ ID NO: 26994 - DNA, 20 bp, synthetic construct
  source 1..20: mol_type = other DNA
agaaaacctccgacgcaacg

SEQ ID NO: 26995 - DNA, 20 bp, synthetic construct
  source 1..20: mol_type = other DNA
cgaaaacgaaagttccagag

SEQ ID NO: 26996 - DNA, 20 bp, synthetic construct
  source 1..20: mol_type = other DNA
cctcagaccatctagactga

SEQ ID NO: 26997 - DNA, 20 bp, synthetic construct
  source 1..20: mol_type = other DNA
cctcagacctctttggtcag

SEQ ID NO: 26998 - DNA, 20 bp, synthetic construct
  source 1..20: mol_type = other DNA
agcctttttaatactgtctg

SEQ ID NO: 26999 - DNA, 20 bp, synthetic construct
  source 1..20: mol_type = other DNA
gaaaacctccgacgcaacgg

SEQ ID NO: 27000 - DNA, 20 bp, synthetic construct
  source 1..20: mol_type = other DNA
tccctcagaccactctagac

SEQ ID NO: 27001 - DNA, 20 bp, synthetic construct
  source 1..20: mol_type = other DNA
ggactcgaaagcggaagttc

SEQ ID NO: 27002 - DNA, 20 bp, synthetic construct
  source 1..20: mol_type = other DNA
ggactcgaaagcgaaagttc

SEQ ID NO: 27003 - DNA, 20 bp, synthetic construct
  source 1..20: mol_type = other DNA
gactcgaaagcgaaagttcc

SEQ ID NO: 27004 - DNA, 20 bp, synthetic construct
  source 1..20: mol_type = other DNA
ccctcagaccctttagtcag

SEQ ID NO: 27005 - DNA, 20 bp, synthetic construct
  source 1..20: mol_type = other DNA
ccctcagaccactctagact

SEQ ID NO: 27006 - DNA, 20 bp, synthetic construct
  source 1..20: mol_type = other DNA
atgaattagaaaaagttagg

SEQ ID NO: 27007 - DNA, 20 bp, synthetic construct
  source 1..20: mol_type = other DNA
cctcagactactctagacag

SEQ ID NO: 27008 - DNA, 20 bp, synthetic construct
  source 1..20: mol_type = other DNA
cctcagaccaatttggtagt

SEQ ID NO: 27009 - DNA, 20 bp, synthetic construct
  source 1..20: mol_type = other DNA
cctcagacctctgtagtcag

SEQ ID NO: 27010 - DNA, 20 bp, synthetic construct
  source 1..20: mol_type = other DNA
cctcagacctttttggcagt

SEQ ID NO: 27011 - DNA, 20 bp, synthetic construct
  source 1..20: mol_type = other DNA
cctcagacctttttggtagt

SEQ ID NO: 27012 - DNA, 20 bp, synthetic construct
  source 1..20: mol_type = other DNA
ctcagacaattctagtcagt

SEQ ID NO: 27013 - DNA, 20 bp, synthetic construct
  source 1..20: mol_type = other DNA
cctcagaccattttggtagt

SEQ ID NO: 27014 - DNA, 20 bp, synthetic construct
  source 1..20: mol_type = other DNA
aaaaatctctagcagtggcg

SEQ ID NO: 27015 - DNA, 20 bp, synthetic construct
  source 1..20: mol_type = other DNA
cgaaagtagaaccagagacg

SEQ ID NO: 27016 - DNA, 20 bp, synthetic construct
  source 1..20: mol_type = other DNA
ccctcagattaaattatagt

SEQ ID NO: 27017 - DNA, 20 bp, synthetic construct
  source 1..20: mol_type = other DNA
cctcagaccttttagtcagt

SEQ ID NO: 27018 - DNA, 20 bp, synthetic construct
  source 1..20: mol_type = other DNA
agcgaaaggaaaaccagagg

SEQ ID NO: 27019 - DNA, 20 bp, synthetic construct
  source 1..20: mol_type = other DNA
agactgtgtaaaaatctcta

SEQ ID NO: 27020 - DNA, 20 bp, synthetic construct
  source 1..20: mol_type = other DNA
gtttgtgtaaaaatctctag

SEQ ID NO: 27021 - DNA, 20 bp, synthetic construct
  source 1..20: mol_type = other DNA
acttagtgaaaaatctctag

SEQ ID NO: 27022 - DNA, 20 bp, synthetic construct
  source 1..20: mol_type = other DNA
actgtgtaaaaaatctctag

SEQ ID NO: 27023 - DNA, 20 bp, synthetic construct
  source 1..20: mol_type = other DNA
atcacttagactgaagcaga

SEQ ID NO: 27024 - DNA, 20 bp, synthetic construct
  source 1..20: mol_type = other DNA
cagaccaccttagcagagtg

SEQ ID NO: 27025 - DNA, 20 bp, synthetic construct
  source 1..20: mol_type = other DNA
cagactctcgtagtcagtgt

SEQ ID NO: 27026 - DNA, 20 bp, synthetic construct
  source 1..20: mol_type = other DNA
ctcagaccaattgtggtagt

SEQ ID NO: 27027 - DNA, 20 bp, synthetic construct
  source 1..20: mol_type = other DNA
atgaattagaaaaaattagg

SEQ ID NO: 27028 - DNA, 20 bp, synthetic construct
  source 1..20: mol_type = other DNA
ctcgaaagcgaaagttacag

SEQ ID NO: 27029 - DNA, 20 bp, synthetic construct
  source 1..20: mol_type = other DNA
cgcgaaagcgaaagtagaac

SEQ ID NO: 27030 - DNA, 20 bp, synthetic construct
  source 1..20: mol_type = other DNA
cttgaaagcgaaagtagaac

SEQ ID NO: 27031 - DNA, 20 bp, synthetic construct
  source 1..20: mol_type = other DNA
gaagaaaacctccgacgcga

SEQ ID NO: 27032 - DNA, 20 bp, synthetic construct
  source 1..20: mol_type = other DNA
actcgaaagcggcggttcca

SEQ ID NO: 27033 - DNA, 20 bp, synthetic construct
  source 1..20: mol_type = other DNA
actcgaaagcggaagttcca

SEQ ID NO: 27034 - DNA, 20 bp, synthetic construct
  source 1..20: mol_type = other DNA
ctcgaaaacgaaagttccag

SEQ ID NO: 27035 - DNA, 20 bp, synthetic construct
  source 1..20: mol_type = other DNA
actcgaaagcgaaagttcca

SEQ ID NO: 27036 - DNA, 20 bp, synthetic construct
  source 1..20: mol_type = other DNA
atgaattagaaagaattagg

SEQ ID NO: 27037 - DNA, 20 bp, synthetic construct
  source 1..20: mol_type = other DNA
ctcagacccttgttggttgc

SEQ ID NO: 27038 - DNA, 20 bp, synthetic construct
  source 1..20: mol_type = other DNA
atgaattagaaaaggttagg

SEQ ID NO: 27039 - DNA, 20 bp, synthetic construct
  source 1..20: mol_type = other DNA
gggactcgaaagcgaaagtt

SEQ ID NO: 27040 - DNA, 20 bp, synthetic construct
  source 1..20: mol_type = other DNA
ggagcgtggcccctggacgc

SEQ ID NO: 27041 - DNA, 20 bp, synthetic construct
  source 1..20: mol_type = other DNA
atccctcagaccactataga

SEQ ID NO: 27042 - DNA, 20 bp, synthetic construct
  source 1..20: mol_type = other DNA
atccctcagaccactctaga

SEQ ID NO: 27043 - DNA, 20 bp, synthetic construct
  source 1..20: mol_type = other DNA
atccctcagaccactctagg

SEQ ID NO: 27044 - DNA, 20 bp, synthetic construct
  source 1..20: mol_type = other DNA
acttgaaagcgaaagtagaa

SEQ ID NO: 27045 - DNA, 20 bp, synthetic construct
  source 1..20: mol_type = other DNA
agtcaaaagaaggttgccaa

SEQ ID NO: 27046 - DNA, 20 bp, synthetic construct
  source 1..20: mol_type = other DNA
agaccaaagacggttgtcaa

SEQ ID NO: 27047 - DNA, 20 bp, synthetic construct
  source 1..20: mol_type = other DNA
agtcaaaagaagggtgtcaa

SEQ ID NO: 27048 - DNA, 20 bp, synthetic construct
  source 1..20: mol_type = other DNA
aaagtaaagaaggctgtcaa

SEQ ID NO: 27049 - DNA, 20 bp, synthetic construct
  source 1..20: mol_type = other DNA
actcgaaagcgaaagtgcca

SEQ ID NO: 27050 - DNA, 20 bp, synthetic construct
  source 1..20: mol_type = other DNA
gaatctctcgacgcacggac

SEQ ID NO: 27051 - DNA, 20 bp, synthetic construct
  source 1..20: mol_type = other DNA
agtgtaaaatctctagcagt

SEQ ID NO: 27052 - DNA, 20 bp, synthetic construct
  source 1..20: mol_type = other DNA
gactcgaaagcgaaagtgtt

SEQ ID NO: 27053 - DNA, 20 bp, synthetic construct
  source 1..20: mol_type = other DNA
gtgtaaaaatctctagcagt

SEQ ID NO: 27054 - DNA, 20 bp, synthetic construct
  source 1..20: mol_type = other DNA
tgtggaaaatctctagcagt

SEQ ID NO: 27055 - DNA, 20 bp, synthetic construct
  source 1..20: mol_type = other DNA
ctcagacccctttagtcagt

SEQ ID NO: 27056 - DNA, 20 bp, synthetic construct
  source 1..20: mol_type = other DNA
ctcagacccttttagccagt

SEQ ID NO: 27057 - DNA, 20 bp, synthetic construct
  source 1..20: mol_type = other DNA
ctcagaacattttagtccgg

SEQ ID NO: 27058 - DNA, 20 bp, synthetic construct
  source 1..20: mol_type = other DNA
ctcagaacctattagtcagt

SEQ ID NO: 27059 - DNA, 20 bp, synthetic construct
  source 1..20: mol_type = other DNA
ctcagacacattttgtccgt

SEQ ID NO: 27060 - DNA, 20 bp, synthetic construct
  source 1..20: mol_type = other DNA
ctcagacacttgtagtcagt

SEQ ID NO: 27061 - DNA, 20 bp, synthetic construct
  source 1..20: mol_type = other DNA
ctcagacatttgtagtcagt

SEQ ID NO: 27062 - DNA, 20 bp, synthetic construct
  source 1..20: mol_type = other DNA
ctcagaccaactttggtagt

SEQ ID NO: 27063 - DNA, 20 bp, synthetic construct
  source 1..20: mol_type = other DNA
ctcagaccaatttagtcagg

SEQ ID NO: 27064 - DNA, 20 bp, synthetic construct
  source 1..20: mol_type = other DNA
ctcagaccaatttagtccgt

SEQ ID NO: 27065 - DNA, 20 bp, synthetic construct
  source 1..20: mol_type = other DNA
ctcagaccatcttagtcagt

SEQ ID NO: 27066 - DNA, 20 bp, synthetic construct
  source 1..20: mol_type = other DNA
ctcagaccattcgtggtagt

SEQ ID NO: 27067 - DNA, 20 bp, synthetic construct
  source 1..20: mol_type = other DNA
ctcagaccatttagtcagtg

SEQ ID NO: 27068 - DNA, 20 bp, synthetic construct
  source 1..20: mol_type = other DNA
ctcagaccattttagtcagt

SEQ ID NO: 27069 - DNA, 20 bp, synthetic construct
  source 1..20: mol_type = other DNA
ctcagacccttaaagtcaat

SEQ ID NO: 27070 - DNA, 20 bp, synthetic construct
  source 1..20: mol_type = other DNA
ctcagacccttgtagtcagt

SEQ ID NO: 27071 - DNA, 20 bp, synthetic construct
  source 1..20: mol_type = other DNA
ctcagacccttttagtcagt

SEQ ID NO: 27072 - DNA, 20 bp, synthetic construct
  source 1..20: mol_type = other DNA
ctcagacccttttagtccgt

SEQ ID NO: 27073 - DNA, 20 bp, synthetic construct
  source 1..20: mol_type = other DNA
ctcagaccctttttggtagt

SEQ ID NO: 27074 - DNA, 20 bp, synthetic construct
  source 1..20: mol_type = other DNA
ctcagacctcggtagtcagt

SEQ ID NO: 27075 - DNA, 20 bp, synthetic construct
  source 1..20: mol_type = other DNA
ctcagacctctttagtcagt

SEQ ID NO: 27076 - DNA, 20 bp, synthetic construct
  source 1..20: mol_type = other DNA
ctcagactcttttagtcagt

SEQ ID NO: 27077 - DNA, 20 bp, synthetic construct
  source 1..20: mol_type = other DNA
ctcagaccatcctagttagt

SEQ ID NO: 27078 - DNA, 20 bp, synthetic construct
  source 1..20: mol_type = other DNA
ctcagatccttttagttagc

SEQ ID NO: 27079 - DNA, 20 bp, synthetic construct
  source 1..20: mol_type = other DNA
ctcatacccttttagtcagt

SEQ ID NO: 27080 - DNA, 20 bp, synthetic construct
  source 1..20: mol_type = other DNA
ctcagaccctattagtcagt

SEQ ID NO: 27081 - DNA, 20 bp, synthetic construct
  source 1..20: mol_type = other DNA
ctcagacccttgttggtagt

SEQ ID NO: 27082 - DNA, 20 bp, synthetic construct
  source 1..20: mol_type = other DNA
ctcagacccttgttggtatt

SEQ ID NO: 27083 - DNA, 20 bp, synthetic construct
  source 1..20: mol_type = other DNA
ctcagacaccttttgtcagt

SEQ ID NO: 27084 - DNA, 20 bp, synthetic construct
  source 1..20: mol_type = other DNA
ctcagaccctttgtggtagt

SEQ ID NO: 27085 - DNA, 20 bp, synthetic construct
  source 1..20: mol_type = other DNA
ggacgcgaaagcgaaagttc

SEQ ID NO: 27086 - DNA, 20 bp, synthetic construct
  source 1..20: mol_type = other DNA
gtagagatccctcagatctc

SEQ ID NO: 27087 - DNA, 20 bp, synthetic construct
  source 1..20: mol_type = other DNA
gtagagatccctcagatttg

SEQ ID NO: 27088 - DNA, 20 bp, synthetic construct
  source 1..20: mol_type = other DNA
agtaaaaatctctagcagtg

SEQ ID NO: 27089 - DNA, 20 bp, synthetic construct
  source 1..20: mol_type = other DNA
cgaacagggacttgaaaacg

SEQ ID NO: 27090 - DNA, 20 bp, synthetic construct
  source 1..20: mol_type = other DNA
gaaagtagaaccagaggaga

SEQ ID NO: 27091 - DNA, 20 bp, synthetic construct
  source 1..20: mol_type = other DNA
gaaagtagaaccagagaaga

SEQ ID NO: 27092 - DNA, 20 bp, synthetic construct
  source 1..20: mol_type = other DNA
ctcagaactcttaaaagtag

SEQ ID NO: 27093 - DNA, 20 bp, synthetic construct
  source 1..20: mol_type = other DNA
tcagaccacttgggctgagt

SEQ ID NO: 27094 - DNA, 20 bp, synthetic construct
  source 1..20: mol_type = other DNA
aaagtaaaaccagaggagat

SEQ ID NO: 27095 - DNA, 20 bp, synthetic construct
  source 1..20: mol_type = other DNA
aagcgaaagtaagaccagag

SEQ ID NO: 27096 - DNA, 20 bp, synthetic construct
  source 1..20: mol_type = other DNA
aagcgaaagtagaaccagag

SEQ ID NO: 27097 - DNA, 20 bp, synthetic construct
  source 1..20: mol_type = other DNA
aagcgaaagtaagaccggag

SEQ ID NO: 27098 - DNA, 20 bp, synthetic construct
  source 1..20: mol_type = other DNA
aagcgaaagtgagaccagag

SEQ ID NO: 27099 - DNA, 20 bp, synthetic construct
  source 1..20: mol_type = other DNA
aaacgaaagtaagaccagag

SEQ ID NO: 27100 - DNA, 20 bp, synthetic construct
  source 1..20: mol_type = other DNA
aagcgaaagtaaaaccagag

SEQ ID NO: 27101 - DNA, 20 bp, synthetic construct
  source 1..20: mol_type = other DNA
aagtgaaagtagaaccagag

SEQ ID NO: 27102 - DNA, 20 bp, synthetic construct
  source 1..20: mol_type = other DNA
gactgtgtaaaaatctctag

SEQ ID NO: 27103 - DNA, 20 bp, synthetic construct
  source 1..20: mol_type = other DNA
gattgagtaaaaatctctag

SEQ ID NO: 27104 - DNA, 20 bp, synthetic construct
  source 1..20: mol_type = other DNA
gacggtgtaaaaatctctag

SEQ ID NO: 27105 - DNA, 20 bp, synthetic construct
  source 1..20: mol_type = other DNA
gcttgagtagaaatctctag

SEQ ID NO: 27106 - DNA, 20 bp, synthetic construct
  source 1..20: mol_type = other DNA
gtcactgtagaaaatctcta

SEQ ID NO: 27107 - DNA, 20 bp, synthetic construct
  source 1..20: mol_type = other DNA
gtcagtgtaaaaatctctag

SEQ ID NO: 27108 - DNA, 20 bp, synthetic construct
  source 1..20: mol_type = other DNA
gatcacgtagactgaggcag

SEQ ID NO: 27109 - DNA, 20 bp, synthetic construct
  source 1..20: mol_type = other DNA
gatcacttagactgaagcag

SEQ ID NO: 27110 - DNA, 20 bp, synthetic construct
  source 1..20: mol_type = other DNA
gatcacatagactgaagcag

SEQ ID NO: 27111 - DNA, 20 bp, synthetic construct
  source 1..20: mol_type = other DNA
tcagaccattttagtcagag

SEQ ID NO: 27112 - DNA, 20 bp, synthetic construct
  source 1..20: mol_type = other DNA
tcagaccattttagtcagtg

SEQ ID NO: 27113 - DNA, 20 bp, synthetic construct
  source 1..20: mol_type = other DNA
tcagacccttttagtcagtg

SEQ ID NO: 27114 - DNA, 20 bp, synthetic construct
  source 1..20: mol_type = other DNA
tcagacagctttagtccggg

SEQ ID NO: 27115 - DNA, 20 bp, synthetic construct
  source 1..20: mol_type = other DNA
ccctcagatcacgtagactg

SEQ ID NO: 27116 - DNA, 20 bp, synthetic construct
  source 1..20: mol_type = other DNA
acgcggcccctggacgcagg

SEQ ID NO: 27117 - DNA, 20 bp, synthetic construct
  source 1..20: mol_type = other DNA
tgtgtggaaaatctctagca

SEQ ID NO: 27118 - DNA, 20 bp, synthetic construct
  source 1..20: mol_type = other DNA
agacccttttagtcagtgtg

SEQ ID NO: 27119 - DNA, 20 bp, synthetic construct
  source 1..20: mol_type = other DNA
tgtgtgactctggtaactag

SEQ ID NO: 27120 - DNA, 20 bp, synthetic construct
  source 1..20: mol_type = other DNA
agagcacttcccaacgctgc

SEQ ID NO: 27121 - DNA, 20 bp, synthetic construct
  source 1..20: mol_type = other DNA
gcctccctgcgcacccgcag

SEQ ID NO: 27122 - DNA, 20 bp, synthetic construct
  source 1..20: mol_type = other DNA
cagccttcgctccaggggaa

SEQ ID NO: 27123 - DNA, 20 bp, synthetic construct
  source 1..20: mol_type = other DNA
cagccttcgctctaggggaa

SEQ ID NO: 27124 - DNA, 20 bp, synthetic construct
  source 1..20: mol_type = other DNA
aagccttcatccttctgggt

SEQ ID NO: 27125 - DNA, 20 bp, synthetic construct
  source 1..20: mol_type = other DNA
gcacagagtcggcgctccct

SEQ ID NO: 27126 - DNA, 20 bp, synthetic construct
  source 1..20: mol_type = other DNA
acacattggactcgctgggc

SEQ ID NO: 27127 - DNA, 20 bp, synthetic construct
  source 1..20: mol_type = other DNA
acacgttggactggctgggc

SEQ ID NO: 27128 - DNA, 20 bp, synthetic construct
  source 1..20: mol_type = other DNA
acacgttggattcgctgggc

SEQ ID NO: 27129 - DNA, 20 bp, synthetic construct
  source 1..20: mol_type = other DNA
gaagacaccagtgggcccgt

SEQ ID NO: 27130 - DNA, 20 bp, synthetic construct
  source 1..20: mol_type = other DNA
ccgccaggcacttctttccg

SEQ ID NO: 27131 - DNA, 20 bp, synthetic construct
  source 1..20: mol_type = other DNA
acttttttcacatatcaact

SEQ ID NO: 27132 - DNA, 20 bp, synthetic construct
  source 1..20: mol_type = other DNA
ttggggtgtttcgcgagtgt

SEQ ID NO: 27133 - DNA, 20 bp, synthetic construct
  source 1..20: mol_type = other DNA
gaagatagtctccacttttt

SEQ ID NO: 27134 - DNA, 20 bp, synthetic construct
  source 1..20: mol_type = other DNA
tcttactggtgtgaggattt

SEQ ID NO: 27135 - DNA, 20 bp, synthetic construct
  source 1..20: mol_type = other DNA
ggcaggatgcgctaccgggc

SEQ ID NO: 27136 - DNA, 20 bp, synthetic construct
  source 1..20: mol_type = other DNA
aatcaggctcaggttctgag

SEQ ID NO: 27137 - DNA, 20 bp, synthetic construct
  source 1..20: mol_type = other DNA
gtttccttggttttaggtgc

SEQ ID NO: 27138 - DNA, 20 bp, synthetic construct
  source 1..20: mol_type = other DNA
taatacattctttttagccg

SEQ ID NO: 27139 - DNA, 20 bp, synthetic construct
  source 1..20: mol_type = other DNA
cccagcgctttggcttctct

SEQ ID NO: 27140 - DNA, 20 bp, synthetic construct
  source 1..20: mol_type = other DNA
tgcctcatgacctactcggc

SEQ ID NO: 27141 - DNA, 20 bp, synthetic construct
  source 1..20: mol_type = other DNA
cgttacggatcggcttactc

SEQ ID NO: 27142 - DNA, 20 bp, synthetic construct
  source 1..20: mol_type = other DNA
cgttacgaatcggcttactc

SEQ ID NO: 27143 - DNA, 20 bp, synthetic construct
  source 1..20: mol_type = other DNA
cgttacggatcggtttactc

SEQ ID NO: 27144 - DNA, 20 bp, synthetic construct
  source 1..20: mol_type = other DNA
agtcttcagcggcgctggct

SEQ ID NO: 27145 - DNA, 20 bp, synthetic construct
  source 1..20: mol_type = other DNA
aggaactggccggggtccgc

SEQ ID NO: 27146 - DNA, 20 bp, synthetic construct
  source 1..20: mol_type = other DNA
tcctcagcttctcatccctg

SEQ ID NO: 27147 - DNA, 20 bp, synthetic construct
  source 1..20: mol_type = other DNA
tcctcggcttctcatccctg

SEQ ID NO: 27148 - DNA, 20 bp, synthetic construct
  source 1..20: mol_type = other DNA
ggcagccgccgcttcccctt

SEQ ID NO: 27149 - DNA, 20 bp, synthetic construct
  source 1..20: mol_type = other DNA
gacctcgcgagccttccgca

SEQ ID NO: 27150 - DNA, 20 bp, synthetic construct
  source 1..20: mol_type = other DNA
cattgttttatacatagcac

SEQ ID NO: 27151 - DNA, 20 bp, synthetic construct
  source 1..20: mol_type = other DNA
ttcacggttcccacccagga

SEQ ID NO: 27152 - DNA, 20 bp, synthetic construct
  source 1..20: mol_type = other DNA
ttcacggttcccatccagga

SEQ ID NO: 27153 - DNA, 20 bp, synthetic construct
  source 1..20: mol_type = other DNA
ttcatggttcccacccagga

SEQ ID NO: 27154 - DNA, 20 bp, synthetic construct
  source 1..20: mol_type = other DNA
ctcccgcaacttgcggagct

SEQ ID NO: 27155 - DNA, 20 bp, synthetic construct
  source 1..20: mol_type = other DNA
ccagtagaatggccaggaca

SEQ ID NO: 27156 - DNA, 20 bp, synthetic construct
  source 1..20: mol_type = other DNA
gggttcgcgcgccctccccc

SEQ ID NO: 27157 - DNA, 20 bp, synthetic construct
  source 1..20: mol_type = other DNA
cttggccctccaactccttt

SEQ ID NO: 27158 - DNA, 20 bp, synthetic construct
  source 1..20: mol_type = other DNA
cacaagcgacacaaatgaac

SEQ ID NO: 27159 - DNA, 20 bp, synthetic construct
  source 1..20: mol_type = other DNA
aagtctccgccggaccctcc

SEQ ID NO: 27160 - DNA, 20 bp, synthetic construct
  source 1..20: mol_type = other DNA
tgtgaattactgtctcacag

SEQ ID NO: 27161 - DNA, 20 bp, synthetic construct
  source 1..20: mol_type = other DNA
gcactggaacttacaacacc

SEQ ID NO: 27162 - DNA, 20 bp, synthetic construct
  source 1..20: mol_type = other DNA
gcaaggcgccacgcaaacag

SEQ ID NO: 27163 - DNA, 20 bp, synthetic construct
  source 1..20: mol_type = other DNA
gtctgtgtcttttggctccg

SEQ ID NO: 27164 - DNA, 20 bp, synthetic construct
  source 1..20: mol_type = other DNA
ccggagcccggggcgtccgc

SEQ ID NO: 27165 - DNA, 20 bp, synthetic construct
  source 1..20: mol_type = other DNA
atccctcatccttcatccct

SEQ ID NO: 27166 - DNA, 20 bp, synthetic construct
  source 1..20: mol_type = other DNA
agtatgttctgccacgttcc

SEQ ID NO: 27167 - DNA, 20 bp, synthetic construct
  source 1..20: mol_type = other DNA
ggcgtgctctcttccctgag

SEQ ID NO: 27168 - DNA, 20 bp, synthetic construct
  source 1..20: mol_type = other DNA
cctttgtgaaagcaaagatg

SEQ ID NO: 27169 - DNA, 20 bp, synthetic construct
  source 1..20: mol_type = other DNA
cctttttgaaagcaaagatg

SEQ ID NO: 27170 - DNA, 20 bp, synthetic construct
  source 1..20: mol_type = other DNA
cgtttttgaaagcaaagatg

SEQ ID NO: 27171 - DNA, 20 bp, synthetic construct
  source 1..20: mol_type = other DNA
gctttgtgaaagcaaagatg

SEQ ID NO: 27172 - DNA, 20 bp, synthetic construct
  source 1..20: mol_type = other DNA
gctttttgaaagcaaagatg

SEQ ID NO: 27173 - DNA, 20 bp, synthetic construct
  source 1..20: mol_type = other DNA
ggcgcgcgccccggggcggg

SEQ ID NO: 27174 - DNA, 20 bp, synthetic construct
  source 1..20: mol_type = other DNA
aacgcgcacgcgcttaagga

SEQ ID NO: 27175 - DNA, 20 bp, synthetic construct
  source 1..20: mol_type = other DNA
tccagcgatgccgccccagc

SEQ ID NO: 27176 - DNA, 20 bp, synthetic construct
  source 1..20: mol_type = other DNA
tgttgctgagttggtctctt

SEQ ID NO: 27177 - DNA, 20 bp, synthetic construct
  source 1..20: mol_type = other DNA
gaggttttggcagctctgga

SEQ ID NO: 27178 - DNA, 20 bp, synthetic construct
  source 1..20: mol_type = other DNA
cacagccccaaccgccgccg

SEQ ID NO: 27179 - DNA, 20 bp, synthetic construct
  source 1..20: mol_type = other DNA
aaagcgcgcgagcaagatgg

SEQ ID NO: 27180 - DNA, 20 bp, synthetic construct
  source 1..20: mol_type = other DNA
ggtccacggggaacccgaag

SEQ ID NO: 27181 - DNA, 20 bp, synthetic construct
  source 1..20: mol_type = other DNA
ggtccacggggaacctgaag

SEQ ID NO: 27182 - DNA, 20 bp, synthetic construct
  source 1..20: mol_type = other DNA
ctggagcctccagagggctg

SEQ ID NO: 27183 - DNA, 20 bp, synthetic construct
  source 1..20: mol_type = other DNA
tgagcacagaaccggaaact

SEQ ID NO: 27184 - DNA, 20 bp, synthetic construct
  source 1..20: mol_type = other DNA
ttaccgtggcgagttccgcg

SEQ ID NO: 27185 - DNA, 20 bp, synthetic construct
  source 1..20: mol_type = other DNA
tccccaggctcacgagcccc

SEQ ID NO: 27186 - DNA, 20 bp, synthetic construct
  source 1..20: mol_type = other DNA
caggggagcgagcccggccc

SEQ ID NO: 27187 - DNA, 20 bp, synthetic construct
  source 1..20: mol_type = other DNA
cgacgttgacttcgaaattg

SEQ ID NO: 27188 - DNA, 20 bp, synthetic construct
  source 1..20: mol_type = other DNA
tttttgaggctgcgcactcg

SEQ ID NO: 27189 - DNA, 20 bp, synthetic construct
  source 1..20: mol_type = other DNA
tctcttcctttctgggctcg

SEQ ID NO: 27190 - DNA, 20 bp, synthetic construct
  source 1..20: mol_type = other DNA
ttcttccgcttcctgtacca

SEQ ID NO: 27191 - DNA, 20 bp, synthetic construct
  source 1..20: mol_type = other DNA
ggctgaaggacttggggagc

SEQ ID NO: 27192 - DNA, 20 bp, synthetic construct
  source 1..20: mol_type = other DNA
cgggtcagagcccctttttt

SEQ ID NO: 27193 - DNA, 20 bp, synthetic construct
  source 1..20: mol_type = other DNA
accggccgccagcccatctg

SEQ ID NO: 27194 - DNA, 20 bp, synthetic construct
  source 1..20: mol_type = other DNA
accacccaggtagggggtta

SEQ ID NO: 27195 - DNA, 20 bp, synthetic construct
  source 1..20: mol_type = other DNA
atcacccaggtagggggtta

SEQ ID NO: 27196 - DNA, 20 bp, synthetic construct
  source 1..20: mol_type = other DNA
tattgtaaatattttatgaa

SEQ ID NO: 27197 - DNA, 20 bp, synthetic construct
  source 1..20: mol_type = other DNA
ggcagcatggcggcgggggc

SEQ ID NO: 27198 - DNA, 20 bp, synthetic construct
  source 1..20: mol_type = other DNA
ttgggggcctttccagaaaa

SEQ ID NO: 27199 - DNA, 20 bp, synthetic construct
  source 1..20: mol_type = other DNA
ttcccacatcggatcgcagg

SEQ ID NO: 27200 - DNA, 20 bp, synthetic construct
  source 1..20: mol_type = other DNA
cctgggaagtggccgcagag

SEQ ID NO: 27201 - DNA, 20 bp, synthetic construct
  source 1..20: mol_type = other DNA
ggctcaccatggaccgctgg

SEQ ID NO: 27202 - DNA, 20 bp, synthetic construct
  source 1..20: mol_type = other DNA
ccatcccggcagtcgtggct

SEQ ID NO: 27203 - DNA, 20 bp, synthetic construct
  source 1..20: mol_type = other DNA
tatgtatgtgtatgtatgtg

SEQ ID NO: 27204 - DNA, 20 bp, synthetic construct
  source 1..20: mol_type = other DNA
gaggcggggtttatagcccg

SEQ ID NO: 27205 - DNA, 20 bp, synthetic construct
  source 1..20: mol_type = other DNA
ccctgcccacccgcggaaac

SEQ ID NO: 27206 - DNA, 20 bp, synthetic construct
  source 1..20: mol_type = other DNA
ccaggactggtttctgtaag

SEQ ID NO: 27207 - DNA, 20 bp, synthetic construct
  source 1..20: mol_type = other DNA
gagatgctaagcgtcaccga

SEQ ID NO: 27208 - DNA, 20 bp, synthetic construct
  source 1..20: mol_type = other DNA
gaggtgccaagcgtcaccga

SEQ ID NO: 27209 - DNA, 20 bp, synthetic construct
  source 1..20: mol_type = other DNA
gaggtgctaagcgtcaccga

SEQ ID NO: 27210 - DNA, 20 bp, synthetic construct
  source 1..20: mol_type = other DNA
cctcgccgcaccacacacag

SEQ ID NO: 27211 - DNA, 20 bp, synthetic construct
  source 1..20: mol_type = other DNA
ttctttttctttttttccca

SEQ ID NO: 27212 - DNA, 20 bp, synthetic construct
  source 1..20: mol_type = other DNA
gtggggaggctattctgccc

SEQ ID NO: 27213 - DNA, 20 bp, synthetic construct
  source 1..20: mol_type = other DNA
gcgcttcattccttcttcca

SEQ ID NO: 27214 - DNA, 20 bp, synthetic construct
  source 1..20: mol_type = other DNA
cgccccgtgcaggctgtgga

SEQ ID NO: 27215 - DNA, 20 bp, synthetic construct
  source 1..20: mol_type = other DNA
gccacagccgcaacgccacc

SEQ ID NO: 27216 - DNA, 20 bp, synthetic construct
  source 1..20: mol_type = other DNA
gcgacagccgcaacgccacc

SEQ ID NO: 27217 - DNA, 20 bp, synthetic construct
  source 1..20: mol_type = other DNA
ctcccagcaaccggtctggc

SEQ ID NO: 27218 - DNA, 20 bp, synthetic construct
  source 1..20: mol_type = other DNA
ctgggcagctggacactggg

SEQ ID NO: 27219 - DNA, 20 bp, synthetic construct
  source 1..20: mol_type = other DNA
ctcttgagatctccggttgg

SEQ ID NO: 27220 - DNA, 20 bp, synthetic construct
  source 1..20: mol_type = other DNA
ctaatgcccaggaacatggc

SEQ ID NO: 27221 - DNA, 20 bp, synthetic construct
  source 1..20: mol_type = other DNA
gagatgattaaggccccgct

SEQ ID NO: 27222 - DNA, 20 bp, synthetic construct
  source 1..20: mol_type = other DNA
gtgggttgcaggaggtgctt

SEQ ID NO: 27223 - DNA, 20 bp, synthetic construct
  source 1..20: mol_type = other DNA
gtgggttgcaggtggtgctt

SEQ ID NO: 27224 - DNA, 20 bp, synthetic construct
  source 1..20: mol_type = other DNA
cgagtggcggctgcagcagc

SEQ ID NO: 27225 - DNA, 20 bp, synthetic construct
  source 1..20: mol_type = other DNA
aaccatgggctgctgtggct

SEQ ID NO: 27226 - DNA, 20 bp, synthetic construct
  source 1..20: mol_type = other DNA
ccggaggcgggagtcacagg

SEQ ID NO: 27227 - DNA, 20 bp, synthetic construct
  source 1..20: mol_type = other DNA
gcacaaggtgtcttttggta

SEQ ID NO: 27228 - DNA, 20 bp, synthetic construct
  source 1..20: mol_type = other DNA
gaaaagcggcccgacctgct

SEQ ID NO: 27229 - DNA, 20 bp, synthetic construct
  source 1..20: mol_type = other DNA
gcataccagatctcaccaga

SEQ ID NO: 27230 - DNA, 20 bp, synthetic construct
  source 1..20: mol_type = other DNA
cagcgaagtctactcccctc

SEQ ID NO: 27231 - DNA, 20 bp, synthetic construct
  source 1..20: mol_type = other DNA
ccatgcctgaaccggcaaaa

SEQ ID NO: 27232 - DNA, 20 bp, synthetic construct
  source 1..20: mol_type = other DNA
actagttttgttagatagtc

SEQ ID NO: 27233 - DNA, 20 bp, synthetic construct
  source 1..20: mol_type = other DNA
gctccagcgccagcgcagcc

SEQ ID NO: 27234 - DNA, 20 bp, synthetic construct
  source 1..20: mol_type = other DNA
ttaagccacaaaaaagccac

SEQ ID NO: 27235 - DNA, 20 bp, synthetic construct
  source 1..20: mol_type = other DNA
tgggatctggctacgccaga

SEQ ID NO: 27236 - DNA, 20 bp, synthetic construct
  source 1..20: mol_type = other DNA
gacgtcatcggggcgccgga

SEQ ID NO: 27237 - DNA, 20 bp, synthetic construct
  source 1..20: mol_type = other DNA
ggctaaagctgggagactga

SEQ ID NO: 27238 - DNA, 20 bp, synthetic construct
  source 1..20: mol_type = other DNA
cgggaccttcgcgacacacc

SEQ ID NO: 27239 - DNA, 20 bp, synthetic construct
  source 1..20: mol_type = other DNA
ccttgggaagaggatgatcc

SEQ ID NO: 27240 - DNA, 20 bp, synthetic construct
  source 1..20: mol_type = other DNA
caagtcctcggcagcctgat

SEQ ID NO: 27241 - DNA, 20 bp, synthetic construct
  source 1..20: mol_type = other DNA
gccccccaggctcccagacc

SEQ ID NO: 27242 - DNA, 20 bp, synthetic construct
  source 1..20: mol_type = other DNA
gactaccactgctttttcct

SEQ ID NO: 27243 - DNA, 20 bp, synthetic construct
  source 1..20: mol_type = other DNA
acttgagtgagatgagagag

SEQ ID NO: 27244 - DNA, 20 bp, synthetic construct
  source 1..20: mol_type = other DNA
ctccattctgggctcttgcc

SEQ ID NO: 27245 - DNA, 20 bp, synthetic construct
  source 1..20: mol_type = other DNA
gggacagcagagaagaaact

SEQ ID NO: 27246 - DNA, 20 bp, synthetic construct
  source 1..20: mol_type = other DNA
gatttgcaacatcctcaaag

SEQ ID NO: 27247 - DNA, 20 bp, synthetic construct
  source 1..20: mol_type = other DNA
tcctcctcccttgtcttaac

SEQ ID NO: 27248 - DNA, 20 bp, synthetic construct
  source 1..20: mol_type = other DNA
tctctggaagagaaaggaag

SEQ ID NO: 27249 - DNA, 20 bp, synthetic construct
  source 1..20: mol_type = other DNA
gtgtgttttgctctccagcc

SEQ ID NO: 27250 - DNA, 20 bp, synthetic construct
  source 1..20: mol_type = other DNA
aacccagaagtctcaagttt

SEQ ID NO: 27251 - DNA, 20 bp, synthetic construct
  source 1..20: mol_type = other DNA
ccattcaccggagcgcgcag

SEQ ID NO: 27252 - DNA, 20 bp, synthetic construct
  source 1..20: mol_type = other DNA
cgctgttgagaagctacccg

SEQ ID NO: 27253 - DNA, 20 bp, synthetic construct
  source 1..20: mol_type = other DNA
agaaaggaggagggcgctcc

SEQ ID NO: 27254 - DNA, 20 bp, synthetic construct
  source 1..20: mol_type = other DNA
gtgtgcccgctctccaagaa

SEQ ID NO: 27255 - DNA, 20 bp, synthetic construct
  source 1..20: mol_type = other DNA
ctgcttggatggtgtcttcc

SEQ ID NO: 27256 - DNA, 20 bp, synthetic construct
  source 1..20: mol_type = other DNA
attacgctctctacggcctg

SEQ ID NO: 27257 - DNA, 20 bp, synthetic construct
  source 1..20: mol_type = other DNA
acacgaagcttgcttctgcc

SEQ ID NO: 27258 - DNA, 20 bp, synthetic construct
  source 1..20: mol_type = other DNA
tgtggcgggatagttttcgg

SEQ ID NO: 27259 - DNA, 20 bp, synthetic construct
  source 1..20: mol_type = other DNA
agcgtgggctgacgcctcgc

SEQ ID NO: 27260 - DNA, 20 bp, synthetic construct
  source 1..20: mol_type = other DNA
tactcggagactgcgccgcg

SEQ ID NO: 27261 - DNA, 20 bp, synthetic construct
  source 1..20: mol_type = other DNA
tcttctcgcggatccagtgt

SEQ ID NO: 27262 - DNA, 20 bp, synthetic construct
  source 1..20: mol_type = other DNA
tgtgtgtccctctgagagtt

SEQ ID NO: 27263 - DNA, 20 bp, synthetic construct
  source 1..20: mol_type = other DNA
tagcgttcgtctggagtagc

SEQ ID NO: 27264 - DNA, 20 bp, synthetic construct
  source 1..20: mol_type = other DNA
gcagtactcgctgggctgag

SEQ ID NO: 27265 - DNA, 20 bp, synthetic construct
  source 1..20: mol_type = other DNA
tgtctcctccacctagcagt

SEQ ID NO: 27266 - DNA, 20 bp, synthetic construct
  source 1..20: mol_type = other DNA
gtcccttcttagctctcgcc

SEQ ID NO: 27267 - DNA, 20 bp, synthetic construct
  source 1..20: mol_type = other DNA
ctagctgctcgcacaggact

SEQ ID NO: 27268 - DNA, 20 bp, synthetic construct
  source 1..20: mol_type = other DNA
aggctgaaccacaaaaggcc

SEQ ID NO: 27269 - DNA, 20 bp, synthetic construct
  source 1..20: mol_type = other DNA
ggaaccaaggtgccagtgag

SEQ ID NO: 27270 - DNA, 20 bp, synthetic construct
  source 1..20: mol_type = other DNA
ccactccgccagaaggtcgc

SEQ ID NO: 27271 - DNA, 20 bp, synthetic construct
  source 1..20: mol_type = other DNA
aattcttctgtgggatcaga

SEQ ID NO: 27272 - DNA, 20 bp, synthetic construct
  source 1..20: mol_type = other DNA
ccagcgaccctaaagcttcc

SEQ ID NO: 27273 - DNA, 20 bp, synthetic construct
  source 1..20: mol_type = other DNA
tggcctaggctttgcctatt

SEQ ID NO: 27274 - DNA, 20 bp, synthetic construct
  source 1..20: mol_type = other DNA
atgaaagatgtacatgactt

SEQ ID NO: 27275 - DNA, 20 bp, synthetic construct
  source 1..20: mol_type = other DNA
cgacgcgtctttgtggtaac

SEQ ID NO: 27276 - DNA, 20 bp, synthetic construct
  source 1..20: mol_type = other DNA
attcctttggctcctccgaa

SEQ ID NO: 27277 - DNA, 20 bp, synthetic construct
  source 1..20: mol_type = other DNA
cagccattcctgaggaggac

SEQ ID NO: 27278 - DNA, 20 bp, synthetic construct
  source 1..20: mol_type = other DNA
taacccgctgaaagtttctc

SEQ ID NO: 27279 - DNA, 20 bp, synthetic construct
  source 1..20: mol_type = other DNA
tgctgctggtaacagggcct

SEQ ID NO: 27280 - DNA, 20 bp, synthetic construct
  source 1..20: mol_type = other DNA
tggaagcggatcgcgtggag

SEQ ID NO: 27281 - DNA, 20 bp, synthetic construct
  source 1..20: mol_type = other DNA
cccagatcttctcaactgga

SEQ ID NO: 27282 - DNA, 20 bp, synthetic construct
  source 1..20: mol_type = other DNA
gctggtaacagggccttgcc

SEQ ID NO: 27283 - DNA, 20 bp, synthetic construct
  source 1..20: mol_type = other DNA
ctgagacggccttggccgga

SEQ ID NO: 27284 - DNA, 20 bp, synthetic construct
  source 1..20: mol_type = other DNA
ggctcttctcggcgtgctgc

SEQ ID NO: 27285 - DNA, 20 bp, synthetic construct
  source 1..20: mol_type = other DNA
cccacgagccgaggcctcct

SEQ ID NO: 27286 - DNA, 20 bp, synthetic construct
  source 1..20: mol_type = other DNA
tgggctgctgcgcgccgcct

SEQ ID NO: 27287 - DNA, 20 bp, synthetic construct
  source 1..20: mol_type = other DNA
ccctgagccccagatctgac

SEQ ID NO: 27288 - DNA, 20 bp, synthetic construct
  source 1..20: mol_type = other DNA
ggcgcaacccacggctgctg

SEQ ID NO: 27289 - DNA, 20 bp, synthetic construct
  source 1..20: mol_type = other DNA
taggggcttcatctctctgc

SEQ ID NO: 27290 - DNA, 20 bp, synthetic construct
  source 1..20: mol_type = other DNA
accctagagaaatgagttgt

SEQ ID NO: 27291 - DNA, 20 bp, synthetic construct
  source 1..20: mol_type = other DNA
agttggaatgaatgatcaga

SEQ ID NO: 27292 - DNA, 20 bp, synthetic construct
  source 1..20: mol_type = other DNA
aggcggtagagcggagaaag

SEQ ID NO: 27293 - DNA, 20 bp, synthetic construct
  source 1..20: mol_type = other DNA
gttttaatagacctacggca

SEQ ID NO: 27294 - DNA, 20 bp, synthetic construct
  source 1..20: mol_type = other DNA
gctagcccgcagcgctcggc

SEQ ID NO: 27295 - DNA, 20 bp, synthetic construct
  source 1..20: mol_type = other DNA
ctcccgctgcgaagcagcgc

SEQ ID NO: 27296 - DNA, 20 bp, synthetic construct
  source 1..20: mol_type = other DNA
tcctgtgtgaaattgcttct

SEQ ID NO: 27297 - DNA, 20 bp, synthetic construct
  source 1..20: mol_type = other DNA
tgatgatttgtcattctagt

SEQ ID NO: 27298 - DNA, 20 bp, synthetic construct
  source 1..20: mol_type = other DNA
aagcgggtcctacgcacgct

SEQ ID NO: 27299 - DNA, 20 bp, synthetic construct
  source 1..20: mol_type = other DNA
cccacagatgctagaagctt

SEQ ID NO: 27300 - DNA, 20 bp, synthetic construct
  source 1..20: mol_type = other DNA
gcgttgttctggattcccgt

SEQ ID NO: 27301 - DNA, 20 bp, synthetic construct
  source 1..20: mol_type = other DNA
tcaccttgagccgggcgagc

SEQ ID NO: 27302 - DNA, 20 bp, synthetic construct
  source 1..20: mol_type = other DNA
ttggcgtcccatgactccac

SEQ ID NO: 27303 - DNA, 20 bp, synthetic construct
  source 1..20: mol_type = other DNA
cgcaacggatcgtttccgga

SEQ ID NO: 27304 - DNA, 20 bp, synthetic construct
  source 1..20: mol_type = other DNA
gcgaaatgttcttttggggc

SEQ ID NO: 27305 - DNA, 20 bp, synthetic construct
  source 1..20: mol_type = other DNA
gataccgagtccgcaacccc

SEQ ID NO: 27306 - DNA, 20 bp, synthetic construct
  source 1..20: mol_type = other DNA
actgtcaagacatttcttcg

SEQ ID NO: 27307 - DNA, 20 bp, synthetic construct
  source 1..20: mol_type = other DNA
ttgcatctcttcgcctctcg

SEQ ID NO: 27308 - DNA, 20 bp, synthetic construct
  source 1..20: mol_type = other DNA
ctaatgccagaatttgaaag

SEQ ID NO: 27309 - DNA, 20 bp, synthetic construct
  source 1..20: mol_type = other DNA
tcccgcgacaggaacatggc

SEQ ID NO: 27310 - DNA, 20 bp, synthetic construct
  source 1..20: mol_type = other DNA
ctctcagcgaaggccgaaaa

SEQ ID NO: 27311 - DNA, 20 bp, synthetic construct
  source 1..20: mol_type = other DNA
ttacagagaaggcagagatc

SEQ ID NO: 27312 - DNA, 20 bp, synthetic construct
  source 1..20: mol_type = other DNA
ttacagagggcatcacctag

SEQ ID NO: 27313 - DNA, 20 bp, synthetic construct
  source 1..20: mol_type = other DNA
acttgtgaaaggcagagatc

SEQ ID NO: 27314 - DNA, 20 bp, synthetic construct
  source 1..20: mol_type = other DNA
tgggacaagtgaaaatgtct

SEQ ID NO: 27315 - DNA, 20 bp, synthetic construct
  source 1..20: mol_type = other DNA
acctgcaggcattttgtgaa

SEQ ID NO: 27316 - DNA, 20 bp, synthetic construct
  source 1..20: mol_type = other DNA
tgtgcgggtttaataaaaaa

SEQ ID NO: 27317 - DNA, 20 bp, synthetic construct
  source 1..20: mol_type = other DNA
cccggcccaaccaagtttaa

SEQ ID NO: 27318 - DNA, 20 bp, synthetic construct
  source 1..20: mol_type = other DNA
aaacttaatgatctaagcgt

SEQ ID NO: 27319 - DNA, 20 bp, synthetic construct
  source 1..20: mol_type = other DNA
cattgttcccagccggatcc

SEQ ID NO: 27320 - DNA, 20 bp, synthetic construct
  source 1..20: mol_type = other DNA
gtaaaccgatcagatctagt

SEQ ID NO: 27321 - DNA, 20 bp, synthetic construct
  source 1..20: mol_type = other DNA
cgagcctcccaagatggcgg

SEQ ID NO: 27322 - DNA, 20 bp, synthetic construct
  source 1..20: mol_type = other DNA
ctgggtggtctaagtcctga

SEQ ID NO: 27323 - DNA, 20 bp, synthetic construct
  source 1..20: mol_type = other DNA
ctgggtggatctttaaaccc

SEQ ID NO: 27324 - DNA, 20 bp, synthetic construct
  source 1..20: mol_type = other DNA
gcataacttctaagtcctga

SEQ ID NO: 27325 - DNA, 20 bp, synthetic construct
  source 1..20: mol_type = other DNA
tagtggttcgcgcaacacgc

SEQ ID NO: 27326 - DNA, 20 bp, synthetic construct
  source 1..20: mol_type = other DNA
ggagccggctcccgggcgcg

SEQ ID NO: 27327 - DNA, 20 bp, synthetic construct
  source 1..20: mol_type = other DNA
tggaggttcttgtctcccct

SEQ ID NO: 27328 - DNA, 20 bp, synthetic construct
  source 1..20: mol_type = other DNA
accagtagcaaatgagatga

SEQ ID NO: 27329 - DNA, 20 bp, synthetic construct
  source 1..20: mol_type = other DNA
ttatctctccacgaatccag

SEQ ID NO: 27330 - DNA, 20 bp, synthetic construct
  source 1..20: mol_type = other DNA
cctcactaccacgaatccag

SEQ ID NO: 27331 - DNA, 20 bp, synthetic construct
  source 1..20: mol_type = other DNA
ctctcaccattgcaacagta

SEQ ID NO: 27332 - DNA, 20 bp, synthetic construct
  source 1..20: mol_type = other DNA
tttgtttttggcggaactac

SEQ ID NO: 27333 - DNA, 20 bp, synthetic construct
  source 1..20: mol_type = other DNA
aaatggggcaaataagaatt

SEQ ID NO: 27334 - DNA, 20 bp, synthetic construct
  source 1..20: mol_type = other DNA
ttgaacaccaaataagaatt

SEQ ID NO: 27335 - DNA, 20 bp, synthetic construct
  source 1..20: mol_type = other DNA
tgcagcagttcttggtattg

SEQ ID NO: 27336 - DNA, 20 bp, synthetic construct
  source 1..20: mol_type = other DNA
gagtaaaagggatttcaggc

SEQ ID NO: 27337 - DNA, 20 bp, synthetic construct
  source 1..20: mol_type = other DNA
gagtaaaatcatgcaagatg

SEQ ID NO: 27338 - DNA, 20 bp, synthetic construct
  source 1..20: mol_type = other DNA
cctcccactgtctcttgtat

SEQ ID NO: 27339 - DNA, 20 bp, synthetic construct
  source 1..20: mol_type = other DNA
agatatttccaatgcgacgg

SEQ ID NO: 27340 - DNA, 20 bp, synthetic construct
  source 1..20: mol_type = other DNA
agatatttgtgcctaatgca

SEQ ID NO: 27341 - DNA, 20 bp, synthetic construct
  source 1..20: mol_type = other DNA
tttatatcttctgtatatta

SEQ ID NO: 27342 - DNA, 20 bp, synthetic construct
  source 1..20: mol_type = other DNA
atgtgtgtgtatgtatatgt

SEQ ID NO: 27343 - DNA, 20 bp, synthetic construct
  source 1..20: mol_type = other DNA
tgaaagcgtttgtgttcatc

SEQ ID NO: 27344 - DNA, 20 bp, synthetic construct
  source 1..20: mol_type = other DNA
gcctctctttgaacctctcc

SEQ ID NO: 27345 - DNA, 20 bp, synthetic construct
  source 1..20: mol_type = other DNA
ttagtatcttgaacctctcc

SEQ ID NO: 27346 - DNA, 20 bp, synthetic construct
  source 1..20: mol_type = other DNA
tcccgggggggtcccgcctc

SEQ ID NO: 27347 - DNA, 20 bp, synthetic construct
  source 1..20: mol_type = other DNA
gtgttctccgagttcctgtc

SEQ ID NO: 27348 - DNA, 20 bp, synthetic construct
  source 1..20: mol_type = other DNA
aaaagggaagaaaaacaaaa

SEQ ID NO: 27349 - DNA, 20 bp, synthetic construct
  source 1..20: mol_type = other DNA
aaaagggactctttcagggt

SEQ ID NO: 27350 - DNA, 20 bp, synthetic construct
  source 1..20: mol_type = other DNA
tgtcttaacagtggatgcat

SEQ ID NO: 27351 - DNA, 20 bp, synthetic construct
  source 1..20: mol_type = other DNA
ctctcatccagtggatgcat

SEQ ID NO: 27352 - DNA, 20 bp, synthetic construct
  source 1..20: mol_type = other DNA
ctctcatcggacttgatatg

SEQ ID NO: 27353 - DNA, 20 bp, synthetic construct
  source 1..20: mol_type = other DNA
acggtcgggccctggaagga

SEQ ID NO: 27354 - DNA, 20 bp, synthetic construct
  source 1..20: mol_type = other DNA
aagcctcttttggcttctct

SEQ ID NO: 27355 - DNA, 20 bp, synthetic construct
  source 1..20: mol_type = other DNA
caggctgggctgcaggctct

SEQ ID NO: 27356 - DNA, 20 bp, synthetic construct
  source 1..20: mol_type = other DNA
ctgatgcgtgccctactctc

SEQ ID NO: 27357 - DNA, 20 bp, synthetic construct
  source 1..20: mol_type = other DNA
agttcactggtgcaatgagg

SEQ ID NO: 27358 - DNA, 20 bp, synthetic construct
  source 1..20: mol_type = other DNA
gtggggtaggtgcaatgagg

SEQ ID NO: 27359 - DNA, 20 bp, synthetic construct
  source 1..20: mol_type = other DNA
atgagacggacacaccttaa

SEQ ID NO: 27360 - DNA, 20 bp, synthetic construct
  source 1..20: mol_type = other DNA
catgccaagacacaccttaa

SEQ ID NO: 27361 - DNA, 20 bp, synthetic construct
  source 1..20: mol_type = other DNA
catgccaatggcataacact

SEQ ID NO: 27362 - DNA, 20 bp, synthetic construct
  source 1..20: mol_type = other DNA
aggaggctgcgaggagccgg

SEQ ID NO: 27363 - DNA, 20 bp, synthetic construct
  source 1..20: mol_type = other DNA
ggatctgcagctgggcaccg

SEQ ID NO: 27364 - DNA, 20 bp, synthetic construct
  source 1..20: mol_type = other DNA
ggatctgcagctgggctagc

SEQ ID NO: 27365 - DNA, 20 bp, synthetic construct
  source 1..20: mol_type = other DNA
atgctgatgaagataataat

SEQ ID NO: 27366 - DNA, 20 bp, synthetic construct
  source 1..20: mol_type = other DNA
cagcaccgctccttgggtcc

SEQ ID NO: 27367 - DNA, 20 bp, synthetic construct
  source 1..20: mol_type = other DNA
caggagagcgcggattggtc

SEQ ID NO: 27368 - DNA, 20 bp, synthetic construct
  source 1..20: mol_type = other DNA
cctctgctggtgaccagaag

SEQ ID NO: 27369 - DNA, 20 bp, synthetic construct
  source 1..20: mol_type = other DNA
gtctacggggtgaccagaag

SEQ ID NO: 27370 - DNA, 20 bp, synthetic construct
  source 1..20: mol_type = other DNA
tattctagtacacttaggat

SEQ ID NO: 27371 - DNA, 20 bp, synthetic construct
  source 1..20: mol_type = other DNA
cgcggctgcgcttcggtccc

SEQ ID NO: 27372 - DNA, 20 bp, synthetic construct
  source 1..20: mol_type = other DNA
gcgaaggccgaaaagaggct

SEQ ID NO: 27373 - DNA, 20 bp, synthetic construct
  source 1..20: mol_type = other DNA
gcgaaggcactgtgattctc

SEQ ID NO: 27374 - DNA, 20 bp, synthetic construct
  source 1..20: mol_type = other DNA
tagtgctatttttgtattta

SEQ ID NO: 27375 - DNA, 20 bp, synthetic construct
  source 1..20: mol_type = other DNA
ctcagaaacacagcaagcga

SEQ ID NO: 27376 - DNA, 20 bp, synthetic construct
  source 1..20: mol_type = other DNA
cgctggtaaacatccacacg

SEQ ID NO: 27377 - DNA, 20 bp, synthetic construct
  source 1..20: mol_type = other DNA
aacggaaaatcatcggccgt

SEQ ID NO: 27378 - DNA, 20 bp, synthetic construct
  source 1..20: mol_type = other DNA
acttttttccgtttcgtagt

SEQ ID NO: 27379 - DNA, 20 bp, synthetic construct
  source 1..20: mol_type = other DNA
ctcctggcgccagcgctagg

SEQ ID NO: 27380 - DNA, 20 bp, synthetic construct
  source 1..20: mol_type = other DNA
tttctccgggatccaagaga

SEQ ID NO: 27381 - DNA, 20 bp, synthetic construct
  source 1..20: mol_type = other DNA
aaaacttaggatccaagaga

SEQ ID NO: 27382 - DNA, 20 bp, synthetic construct
  source 1..20: mol_type = other DNA
agtgattggcctgtcgtaac

SEQ ID NO: 27383 - DNA, 20 bp, synthetic construct
  source 1..20: mol_type = other DNA
tagtccatgcctgtcgtaac

SEQ ID NO: 27384 - DNA, 20 bp, synthetic construct
  source 1..20: mol_type = other DNA
cactatctgctagacctaga

SEQ ID NO: 27385 - DNA, 20 bp, synthetic construct
  source 1..20: mol_type = other DNA
tgtggcctcattctgaacaa

SEQ ID NO: 27386 - DNA, 20 bp, synthetic construct
  source 1..20: mol_type = other DNA
tgtggccttccaggtggttg

SEQ ID NO: 27387 - DNA, 20 bp, synthetic construct
  source 1..20: mol_type = other DNA
aggcagggcggcgcaggatc

SEQ ID NO: 27388 - DNA, 20 bp, synthetic construct
  source 1..20: mol_type = other DNA
gaaagcgaaagggaaaccag

SEQ ID NO: 27389 - DNA, 20 bp, synthetic construct
  source 1..20: mol_type = other DNA
aggacatcagcgacagcgag

SEQ ID NO: 27390 - DNA, 20 bp, synthetic construct
  source 1..20: mol_type = other DNA
cgaattcttatacagtagat

SEQ ID NO: 27391 - DNA, 20 bp, synthetic construct
  source 1..20: mol_type = other DNA
aggttaataaattacaagta

SEQ ID NO: 27392 - DNA, 20 bp, synthetic construct
  source 1..20: mol_type = other DNA
aggttaatccggcgttgtct

SEQ ID NO: 27393 - DNA, 20 bp, synthetic construct
  source 1..20: mol_type = other DNA
aattactcagtttcaaaagg

SEQ ID NO: 27394 - DNA, 20 bp, synthetic construct
  source 1..20: mol_type = other DNA
ctgtctctgctgtgtggtgg

SEQ ID NO: 27395 - DNA, 20 bp, synthetic construct
  source 1..20: mol_type = other DNA
tcatttggccttaaatggga

SEQ ID NO: 27396 - DNA, 20 bp, synthetic construct
  source 1..20: mol_type = other DNA
cagggaccccttaaatggga

SEQ ID NO: 27397 - DNA, 20 bp, synthetic construct
  source 1..20: mol_type = other DNA
agccaaacactccattggga

SEQ ID NO: 27398 - DNA, 20 bp, synthetic construct
  source 1..20: mol_type = other DNA
gatcaaaagtaagaaaaact

SEQ ID NO: 27399 - DNA, 20 bp, synthetic construct
  source 1..20: mol_type = other DNA
ttagtttggtaagaaaaact

SEQ ID NO: 27400 - DNA, 20 bp, synthetic construct
  source 1..20: mol_type = other DNA
ctgctggtggggtagggatg

SEQ ID NO: 27401 - DNA, 20 bp, synthetic construct
  source 1..20: mol_type = other DNA
ttaggtgtcatacctaagat

SEQ ID NO: 27402 - DNA, 20 bp, synthetic construct
  source 1..20: mol_type = other DNA
gcgttgtccatacctaagat

SEQ ID NO: 27403 - DNA, 20 bp, synthetic construct
  source 1..20: mol_type = other DNA
tcctgggcctgcccatccaa

SEQ ID NO: 27404 - DNA, 20 bp, synthetic construct
  source 1..20: mol_type = other DNA
tcctgggctaatgggcgacg

SEQ ID NO: 27405 - DNA, 20 bp, synthetic construct
  source 1..20: mol_type = other DNA
actctgcagcggaaccgact

SEQ ID NO: 27406 - DNA, 20 bp, synthetic construct
  source 1..20: mol_type = other DNA
gttaccatatagctattgga

SEQ ID NO: 27407 - DNA, 20 bp, synthetic construct
  source 1..20: mol_type = other DNA
ctacaccttggtctttccgg

SEQ ID NO: 27408 - DNA, 20 bp, synthetic construct
  source 1..20: mol_type = other DNA
acctccatagaggagcagca

SEQ ID NO: 27409 - DNA, 20 bp, synthetic construct
  source 1..20: mol_type = other DNA
ggtcagggcttgggcgctag

SEQ ID NO: 27410 - DNA, 20 bp, synthetic construct
  source 1..20: mol_type = other DNA
tcacctctttacaaaaccac

SEQ ID NO: 27411 - DNA, 20 bp, synthetic construct
  source 1..20: mol_type = other DNA
agtatagtgccggccgccca

SEQ ID NO: 27412 - DNA, 20 bp, synthetic construct
  source 1..20: mol_type = other DNA
ccaccccggccggccgccca

SEQ ID NO: 27413 - DNA, 20 bp, synthetic construct
  source 1..20: mol_type = other DNA
gaacagatgatgataaacct

SEQ ID NO: 27414 - DNA, 20 bp, synthetic construct
  source 1..20: mol_type = other DNA
ccgtctgggatgataaacct

SEQ ID NO: 27415 - DNA, 20 bp, synthetic construct
  source 1..20: mol_type = other DNA
aaatagaagatttatttggg

SEQ ID NO: 27416 - DNA, 20 bp, synthetic construct
  source 1..20: mol_type = other DNA
agactcaaaatgtatggccc

SEQ ID NO: 27417 - DNA, 20 bp, synthetic construct
  source 1..20: mol_type = other DNA
ttatcataaagcgagttgga

SEQ ID NO: 27418 - DNA, 20 bp, synthetic construct
  source 1..20: mol_type = other DNA
aggcagaagtatgcaaagca

SEQ ID NO: 27419 - DNA, 20 bp, synthetic construct
  source 1..20: mol_type = other DNA
tccacccggtatgcaaagca

SEQ ID NO: 27420 - DNA, 20 bp, synthetic construct
  source 1..20: mol_type = other DNA
tgctcactcagcacaggatc

SEQ ID NO: 27421 - DNA, 20 bp, synthetic construct
  source 1..20: mol_type = other DNA
tgctcactggtggggctcct

SEQ ID NO: 27422 - DNA, 20 bp, synthetic construct
  source 1..20: mol_type = other DNA
cgggtggaacgagagggaac

SEQ ID NO: 27423 - DNA, 20 bp, synthetic construct
  source 1..20: mol_type = other DNA
cgggtggacgagccccacta

SEQ ID NO: 27424 - DNA, 20 bp, synthetic construct
  source 1..20: mol_type = other DNA
taccgaacacgagagggaac

SEQ ID NO: 27425 - DNA, 20 bp, synthetic construct
  source 1..20: mol_type = other DNA
tagggactgttctcttcaca

SEQ ID NO: 27426 - DNA, 20 bp, synthetic construct
  source 1..20: mol_type = other DNA
accttcaggttctcttcaca

SEQ ID NO: 27427 - DNA, 20 bp, synthetic construct
  source 1..20: mol_type = other DNA
gaagcgccggcctcggggct

SEQ ID NO: 27428 - DNA, 20 bp, synthetic construct
  source 1..20: mol_type = other DNA
atgtgtgatccagatatgct

SEQ ID NO: 27429 - DNA, 20 bp, synthetic construct
  source 1..20: mol_type = other DNA
ccgccccttcagccccggct

SEQ ID NO: 27430 - DNA, 20 bp, synthetic construct
  source 1..20: mol_type = other DNA
ggaaagacaggtccttaggt

SEQ ID NO: 27431 - DNA, 20 bp, synthetic construct
  source 1..20: mol_type = other DNA
ggaaagaccatcgggctcaa

SEQ ID NO: 27432 - DNA, 20 bp, synthetic construct
  source 1..20: mol_type = other DNA
agccggggcggaaaggctgc

SEQ ID NO: 27433 - DNA, 20 bp, synthetic construct
  source 1..20: mol_type = other DNA
caagcctacggaaaggctgc

SEQ ID NO: 27434 - DNA, 20 bp, synthetic construct
  source 1..20: mol_type = other DNA
agcaactaatcgaatcaaca

SEQ ID NO: 27435 - DNA, 20 bp, synthetic construct
  source 1..20: mol_type = other DNA
acctactggaaataacataa

SEQ ID NO: 27436 - DNA, 20 bp, synthetic construct
  source 1..20: mol_type = other DNA
acacgcttccctggattggc

SEQ ID NO: 27437 - DNA, 20 bp, synthetic construct
  source 1..20: mol_type = other DNA
ttcggagaggcagcgcggtt

SEQ ID NO: 27438 - DNA, 20 bp, synthetic construct
  source 1..20: mol_type = other DNA
ggaaattggccgcccgagcg

SEQ ID NO: 27439 - DNA, 20 bp, synthetic construct
  source 1..20: mol_type = other DNA
gttgacaatcccagtggggg

SEQ ID NO: 27440 - DNA, 20 bp, synthetic construct
  source 1..20: mol_type = other DNA
tcttctagactaggtgcgag

SEQ ID NO: 27441 - DNA, 20 bp, synthetic construct
  source 1..20: mol_type = other DNA
tcttctagttcgtcccatgt

SEQ ID NO: 27442 - DNA, 20 bp, synthetic construct
  source 1..20: mol_type = other DNA
cttcttgtgttttgttgtct

SEQ ID NO: 27443 - DNA, 20 bp, synthetic construct
  source 1..20: mol_type = other DNA
atgccaattttctcgagaaa

SEQ ID NO: 27444 - DNA, 20 bp, synthetic construct
  source 1..20: mol_type = other DNA
agagcataaggaatctactt

SEQ ID NO: 27445 - DNA, 20 bp, synthetic construct
  source 1..20: mol_type = other DNA
acttgaccaggagactgaag

SEQ ID NO: 27446 - DNA, 20 bp, synthetic construct
  source 1..20: mol_type = other DNA
cggactgaaggagactgaag

SEQ ID NO: 27447 - DNA, 20 bp, synthetic construct
  source 1..20: mol_type = other DNA
attgggcgggctgccacggc

SEQ ID NO: 27448 - DNA, 20 bp, synthetic construct
  source 1..20: mol_type = other DNA
gagaatctagttattagaca

SEQ ID NO: 27449 - DNA, 20 bp, synthetic construct
  source 1..20: mol_type = other DNA
gagaatctcccatgatttgc

SEQ ID NO: 27450 - DNA, 20 bp, synthetic construct
  source 1..20: mol_type = other DNA
ctagccacagctaactgccc

SEQ ID NO: 27451 - DNA, 20 bp, synthetic construct
  source 1..20: mol_type = other DNA
gataaataagctaactgccc

SEQ ID NO: 27452 - DNA, 20 bp, synthetic construct
  source 1..20: mol_type = other DNA
ctcacagtaaaatagcacag

SEQ ID NO: 27453 - DNA, 20 bp, synthetic construct
  source 1..20: mol_type = other DNA
tgttgctattagaggttctt

SEQ ID NO: 27454 - DNA, 20 bp, synthetic construct
  source 1..20: mol_type = other DNA
cagaatgcttagaggttctt

SEQ ID NO: 27455 - DNA, 20 bp, synthetic construct
  source 1..20: mol_type = other DNA
gacattctttgaagtgaagc

SEQ ID NO: 27456 - DNA, 20 bp, synthetic construct
  source 1..20: mol_type = other DNA
cctgggagtctcggaggggg

SEQ ID NO: 27457 - DNA, 20 bp, synthetic construct
  source 1..20: mol_type = other DNA
cctgggagtctcggagggga

SEQ ID NO: 27458 - DNA, 20 bp, synthetic construct
  source 1..20: mol_type = other DNA
agaccatatctcggagggga

SEQ ID NO: 27459 - DNA, 20 bp, synthetic construct
  source 1..20: mol_type = other DNA
gcggcgccgccagagtctga

SEQ ID NO: 27460 - DNA, 20 bp, synthetic construct
  source 1..20: mol_type = other DNA
tcgaatcatgcacacctgtt

SEQ ID NO: 27461 - DNA, 20 bp, synthetic construct
  source 1..20: mol_type = other DNA
aattcatttgcacacctgtt

SEQ ID NO: 27462 - DNA, 20 bp, synthetic construct
  source 1..20: mol_type = other DNA
ttcgtcgatgttggagtgtc

SEQ ID NO: 27463 - DNA, 20 bp, synthetic construct
  source 1..20: mol_type = other DNA
ctctacctcaccgtccaggg

SEQ ID NO: 27464 - DNA, 20 bp, synthetic construct
  source 1..20: mol_type = other DNA
tctagagccaccgtccaggg

SEQ ID NO: 27465 - DNA, 20 bp, synthetic construct
  source 1..20: mol_type = other DNA
tcacccttgacttggggagc

SEQ ID NO: 27466 - DNA, 20 bp, synthetic construct
  source 1..20: mol_type = other DNA
tatccgcctacgtatttccg

SEQ ID NO: 27467 - DNA, 20 bp, synthetic construct
  source 1..20: mol_type = other DNA
gcgaaaattacgtatttccg

SEQ ID NO: 27468 - DNA, 20 bp, synthetic construct
  source 1..20: mol_type = other DNA
ccttcccattcaccctagtc

SEQ ID NO: 27469 - DNA, 20 bp, synthetic construct
  source 1..20: mol_type = other DNA
caccgacccggggccggggc

SEQ ID NO: 27470 - DNA, 20 bp, synthetic construct
  source 1..20: mol_type = other DNA
ggggagggacatatacttct

SEQ ID NO: 27471 - DNA, 20 bp, synthetic construct
  source 1..20: mol_type = other DNA
ggggagggcggggccggggc

SEQ ID NO: 27472 - DNA, 20 bp, synthetic construct
  source 1..20: mol_type = other DNA
actggaaccccgcggggttc

SEQ ID NO: 27473 - DNA, 20 bp, synthetic construct
  source 1..20: mol_type = other DNA
actggaacttacaacacccg

SEQ ID NO: 27474 - DNA, 20 bp, synthetic construct
  source 1..20: mol_type = other DNA
cagtgcggagctcctgagac

SEQ ID NO: 27475 - DNA, 20 bp, synthetic construct
  source 1..20: mol_type = other DNA
cagatgaggagactgtcctt

SEQ ID NO: 27476 - DNA, 20 bp, synthetic construct
  source 1..20: mol_type = other DNA
agcactgagtttagtaatag

SEQ ID NO: 27477 - DNA, 20 bp, synthetic construct
  source 1..20: mol_type = other DNA
aacggaaaccaggtggaacc

SEQ ID NO: 27478 - DNA, 20 bp, synthetic construct
  source 1..20: mol_type = other DNA
ggccttaaatgggattctgt

SEQ ID NO: 27479 - DNA, 20 bp, synthetic construct
  source 1..20: mol_type = other DNA
ggagcctgggaggctgggtg

SEQ ID NO: 27480 - DNA, 20 bp, synthetic construct
  source 1..20: mol_type = other DNA
ccctcccaatcgatatgggc

SEQ ID NO: 27481 - DNA, 20 bp, synthetic construct
  source 1..20: mol_type = other DNA
ccctcccagcactatgccct

SEQ ID NO: 27482 - DNA, 20 bp, synthetic construct
  source 1..20: mol_type = other DNA
agaggtaggcactatgccct

SEQ ID NO: 27483 - DNA, 20 bp, synthetic construct
  source 1..20: mol_type = other DNA
gccaggtgtcctggggactc

SEQ ID NO: 27484 - DNA, 20 bp, synthetic construct
  source 1..20: mol_type = other DNA
aaggcagctcctggggactc

SEQ ID NO: 27485 - DNA, 20 bp, synthetic construct
  source 1..20: mol_type = other DNA
atcctcctctaaacgcgtgt

SEQ ID NO: 27486 - DNA, 20 bp, synthetic construct
  source 1..20: mol_type = other DNA
gcggatgcctaaacgcgtgt

SEQ ID NO: 27487 - DNA, 20 bp, synthetic construct
  source 1..20: mol_type = other DNA
agaactactgagaaaaacca

SEQ ID NO: 27488 - DNA, 20 bp, synthetic construct
  source 1..20: mol_type = other DNA
gtcactggttaacttaggat

SEQ ID NO: 27489 - DNA, 20 bp, synthetic construct
  source 1..20: mol_type = other DNA
ggatctgctctccggcaaag

SEQ ID NO: 27490 - DNA, 20 bp, synthetic construct
  source 1..20: mol_type = other DNA
aacatatttctccggcaaag

SEQ ID NO: 27491 - DNA, 20 bp, synthetic construct
  source 1..20: mol_type = other DNA
tgtttgggctaagacctggt

SEQ ID NO: 27492 - DNA, 20 bp, synthetic construct
  source 1..20: mol_type = other DNA
tgtttgggtatcagggaaaa

SEQ ID NO: 27493 - DNA, 20 bp, synthetic construct
  source 1..20: mol_type = other DNA
caatatggccggagctggcc

SEQ ID NO: 27494 - DNA, 20 bp, synthetic construct
  source 1..20: mol_type = other DNA
aactatggggtccgtgcgga

SEQ ID NO: 27495 - DNA, 20 bp, synthetic construct
  source 1..20: mol_type = other DNA
gcaggcagggtccgtgcgga

SEQ ID NO: 27496 - DNA, 20 bp, synthetic construct
  source 1..20: mol_type = other DNA
gtcccaaggcttcccagagc

SEQ ID NO: 27497 - DNA, 20 bp, synthetic construct
  source 1..20: mol_type = other DNA
ttagctctgtattaataata

SEQ ID NO: 27498 - DNA, 20 bp, synthetic construct
  source 1..20: mol_type = other DNA
attttttaccgaaaggcctg

SEQ ID NO: 27499 - DNA, 20 bp, synthetic construct
  source 1..20: mol_type = other DNA
gatgcttccaggagaatcaa

SEQ ID NO: 27500 - DNA, 20 bp, synthetic construct
  source 1..20: mol_type = other DNA
ttggagaagaagcactatct

SEQ ID NO: 27501 - DNA, 20 bp, synthetic construct
  source 1..20: mol_type = other DNA
gccccggggacttctctctg

SEQ ID NO: 27502 - DNA, 20 bp, synthetic construct
  source 1..20: mol_type = other DNA
gcccggggcgcggggtcgcc

SEQ ID NO: 27503 - DNA, 20 bp, synthetic construct
  source 1..20: mol_type = other DNA
tcaacctcgaaccgactact

SEQ ID NO: 27504 - DNA, 20 bp, synthetic construct
  source 1..20: mol_type = other DNA
cgccgcgggagcggttcgag

SEQ ID NO: 27505 - DNA, 20 bp, synthetic construct
  source 1..20: mol_type = other DNA
cgccgcggtgtgaaagtcga

SEQ ID NO: 27506 - DNA, 20 bp, synthetic construct
  source 1..20: mol_type = other DNA
ataaatttgagcggttcgag

SEQ ID NO: 27507 - DNA, 20 bp, synthetic construct
  source 1..20: mol_type = other DNA
caaggaggtgtacagccctg

SEQ ID NO: 27508 - DNA, 20 bp, synthetic construct
  source 1..20: mol_type = other DNA
ttgtactactaactcattaa

SEQ ID NO: 27509 - DNA, 20 bp, synthetic construct
  source 1..20: mol_type = other DNA
tgtgcggcgaggccgcccac

SEQ ID NO: 27510 - DNA, 20 bp, synthetic construct
  source 1..20: mol_type = other DNA
tgtgcggctccaggtgggct

SEQ ID NO: 27511 - DNA, 20 bp, synthetic construct
  source 1..20: mol_type = other DNA
aacatcagacaaagggccgc

SEQ ID NO: 27512 - DNA, 20 bp, synthetic construct
  source 1..20: mol_type = other DNA
ggaggacactcgcctaggat

SEQ ID NO: 27513 - DNA, 20 bp, synthetic construct
  source 1..20: mol_type = other DNA
aagtgagtctggtctgtggg

SEQ ID NO: 27514 - DNA, 20 bp, synthetic construct
  source 1..20: mol_type = other DNA
aagtgagtgcttctgccatc

SEQ ID NO: 27515 - DNA, 20 bp, synthetic construct
  source 1..20: mol_type = other DNA
gcaatcacgcttctgccatc

SEQ ID NO: 27516 - DNA, 20 bp, synthetic construct
  source 1..20: mol_type = other DNA
atgataggccaagatggcgg

SEQ ID NO: 27517 - DNA, 20 bp, synthetic construct
  source 1..20: mol_type = other DNA
cgcaagtccgtggcggaacc

SEQ ID NO: 27518 - DNA, 20 bp, synthetic construct
  source 1..20: mol_type = other DNA
tcggacagcacatgttagtc

SEQ ID NO: 27519 - DNA, 20 bp, synthetic construct
  source 1..20: mol_type = other DNA
aagaaggtccgggggctgga

SEQ ID NO: 27520 - DNA, 20 bp, synthetic construct
  source 1..20: mol_type = other DNA
cttgtgtgtagatctttggt

SEQ ID NO: 27521 - DNA, 20 bp, synthetic construct
  source 1..20: mol_type = other DNA
cttgtgtgcgatgggagatg

SEQ ID NO: 27522 - DNA, 20 bp, synthetic construct
  source 1..20: mol_type = other DNA
gcccgcaatagatctttggt

SEQ ID NO: 27523 - DNA, 20 bp, synthetic construct
  source 1..20: mol_type = other DNA
ccgctcaagatacttgttca

SEQ ID NO: 27524 - DNA, 20 bp, synthetic construct
  source 1..20: mol_type = other DNA
ccgctcaatgcctggagatt

SEQ ID NO: 27525 - DNA, 20 bp, synthetic construct
  source 1..20: mol_type = other DNA
agggagctaagctcaacgta

SEQ ID NO: 27526 - DNA, 20 bp, synthetic construct
  source 1..20: mol_type = other DNA
gttggcggtagttccaaccc

SEQ ID NO: 27527 - DNA, 20 bp, synthetic construct
  source 1..20: mol_type = other DNA
ccctaaaacagcaacgacac

SEQ ID NO: 27528 - DNA, 20 bp, synthetic construct
  source 1..20: mol_type = other DNA
aaccagtaagggaaccgccg

SEQ ID NO: 27529 - DNA, 20 bp, synthetic construct
  source 1..20: mol_type = other DNA
cgaacggcttgttggaatca

SEQ ID NO: 27530 - DNA, 20 bp, synthetic construct
  source 1..20: mol_type = other DNA
tagtgctattgttggaatca

SEQ ID NO: 27531 - DNA, 20 bp, synthetic construct
  source 1..20: mol_type = other DNA
ttcctccggactcctgcacg

SEQ ID NO: 27532 - DNA, 20 bp, synthetic construct
  source 1..20: mol_type = other DNA
aggacacccccgcccccccg

SEQ ID NO: 27533 - DNA, 20 bp, synthetic construct
  source 1..20: mol_type = other DNA
aggacaccgttaaaaaagac

SEQ ID NO: 27534 - DNA, 20 bp, synthetic construct
  source 1..20: mol_type = other DNA
catttttgcccgcccccccg

SEQ ID NO: 27535 - DNA, 20 bp, synthetic construct
  source 1..20: mol_type = other DNA
tgctgtagggccactgtctg

SEQ ID NO: 27536 - DNA, 20 bp, synthetic construct
  source 1..20: mol_type = other DNA
ctgcaggaggccactgtctg

SEQ ID NO: 27537 - DNA, 20 bp, synthetic construct
  source 1..20: mol_type = other DNA
gcgactgtgtccacggatgg

SEQ ID NO: 27538 - DNA, 20 bp, synthetic construct
  source 1..20: mol_type = other DNA
gtatttttaaaacttaggaa

SEQ ID NO: 27539 - DNA, 20 bp, synthetic construct
  source 1..20: mol_type = other DNA
acagccttcgctccagggga

SEQ ID NO: 27540 - DNA, 20 bp, synthetic construct
  source 1..20: mol_type = other DNA
acagccttgataatcactcg

SEQ ID NO: 27541 - DNA, 20 bp, synthetic construct
  source 1..20: mol_type = other DNA
ccgggtaggggagcgcagcg

SEQ ID NO: 27542 - DNA, 20 bp, synthetic construct
  source 1..20: mol_type = other DNA
gcgtcggatgttcagagcag

SEQ ID NO: 27543 - DNA, 20 bp, synthetic construct
  source 1..20: mol_type = other DNA
caactaattgttcagagcag

SEQ ID NO: 27544 - DNA, 20 bp, synthetic construct
  source 1..20: mol_type = other DNA
cggccgtccctgcggtcccg

SEQ ID NO: 27545 - DNA, 20 bp, synthetic construct
  source 1..20: mol_type = other DNA
ccaccaaggcggcgcagcgc

SEQ ID NO: 27546 - DNA, 20 bp, synthetic construct
  source 1..20: mol_type = other DNA
gagtagctaacgacctgatg

SEQ ID NO: 27547 - DNA, 20 bp, synthetic construct
  source 1..20: mol_type = other DNA
gagtagctgggattacaggc

SEQ ID NO: 27548 - DNA, 20 bp, synthetic construct
  source 1..20: mol_type = other DNA
cccaaagcacatcttaacct

SEQ ID NO: 27549 - DNA, 20 bp, synthetic construct
  source 1..20: mol_type = other DNA
gtatcgtgacatcttaacct

SEQ ID NO: 27550 - DNA, 20 bp, synthetic construct
  source 1..20: mol_type = other DNA
cccaaagccatagaggtagc

SEQ ID NO: 27551 - DNA, 20 bp, synthetic construct
  source 1..20: mol_type = other DNA
cccaaagcttcatggctgta

SEQ ID NO: 27552 - DNA, 20 bp, synthetic construct
  source 1..20: mol_type = other DNA
tactgctacatttttaagac

SEQ ID NO: 27553 - DNA, 20 bp, synthetic construct
  source 1..20: mol_type = other DNA
aagaagcgctaagagaggcc

SEQ ID NO: 27554 - DNA, 20 bp, synthetic construct
  source 1..20: mol_type = other DNA
tgctggggtcatgatggctc

SEQ ID NO: 27555 - DNA, 20 bp, synthetic construct
  source 1..20: mol_type = other DNA
ggctgaagtgtactacgctg

SEQ ID NO: 27556 - DNA, 20 bp, synthetic construct
  source 1..20: mol_type = other DNA
tatgcggcgccgactgtgat

SEQ ID NO: 27557 - DNA, 20 bp, synthetic construct
  source 1..20: mol_type = other DNA
tcctcggcccgcatattgac

SEQ ID NO: 27558 - DNA, 20 bp, synthetic construct
  source 1..20: mol_type = other DNA
tctcctccgggtgatgcttt

SEQ ID NO: 27559 - DNA, 20 bp, synthetic construct
  source 1..20: mol_type = other DNA
tctcctcctaaacgccggaa

SEQ ID NO: 27560 - DNA, 20 bp, synthetic construct
  source 1..20: mol_type = other DNA
cattcgccgagtttctaaac

SEQ ID NO: 27561 - DNA, 20 bp, synthetic construct
  source 1..20: mol_type = other DNA
ggctcagcgagagtgttctt

SEQ ID NO: 27562 - DNA, 20 bp, synthetic construct
  source 1..20: mol_type = other DNA
gagaactaggctgcagcagc

SEQ ID NO: 27563 - DNA, 20 bp, synthetic construct
  source 1..20: mol_type = other DNA
ctgctgctatagctggattt

SEQ ID NO: 27564 - DNA, 20 bp, synthetic construct
  source 1..20: mol_type = other DNA
gtggctaattgataggcagg

SEQ ID NO: 27565 - DNA, 20 bp, synthetic construct
  source 1..20: mol_type = other DNA
tcctgtaggaggagaaaacc

SEQ ID NO: 27566 - DNA, 20 bp, synthetic construct
  source 1..20: mol_type = other DNA
cttccctgtgctgtgagtgt

SEQ ID NO: 27567 - DNA, 20 bp, synthetic construct
  source 1..20: mol_type = other DNA
cttccctgccacagataaag

SEQ ID NO: 27568 - DNA, 20 bp, synthetic construct
  source 1..20: mol_type = other DNA
aacaggacgcgcgtgagctc

SEQ ID NO: 27569 - DNA, 20 bp, synthetic construct
  source 1..20: mol_type = other DNA
tccagcacaccaggcaaagc

SEQ ID NO: 27570 - DNA, 20 bp, synthetic construct
  source 1..20: mol_type = other DNA
tccagcacctgcaaatccag

SEQ ID NO: 27571 - DNA, 20 bp, synthetic construct
  source 1..20: mol_type = other DNA
gattgtaaaaaatttctaga

SEQ ID NO: 27572 - DNA, 20 bp, synthetic construct
  source 1..20: mol_type = other DNA
gattgtaagggccaagcttg

SEQ ID NO: 27573 - DNA, 20 bp, synthetic construct
  source 1..20: mol_type = other DNA
cgcctgcggggccaagcttg

SEQ ID NO: 27574 - DNA, 20 bp, synthetic construct
  source 1..20: mol_type = other DNA
aacagctggtttactggtca

SEQ ID NO: 27575 - DNA, 20 bp, synthetic construct
  source 1..20: mol_type = other DNA
aacagctgtagcgaccacac

SEQ ID NO: 27576 - DNA, 20 bp, synthetic construct
  source 1..20: mol_type = other DNA
ctacatgagagtcctccggc

SEQ ID NO: 27577 - DNA, 20 bp, synthetic construct
  source 1..20: mol_type = other DNA
ggctccccgagtcctccggc

SEQ ID NO: 27578 - DNA, 20 bp, synthetic construct
  source 1..20: mol_type = other DNA
cgtaatattcttgatcgggc

SEQ ID NO: 27579 - DNA, 20 bp, synthetic construct
  source 1..20: mol_type = other DNA
atacagcacgtaacaactgt

SEQ ID NO: 27580 - DNA, 20 bp, synthetic construct
  source 1..20: mol_type = other DNA
gctagttgcgtaacaactgt

SEQ ID NO: 27581 - DNA, 20 bp, synthetic construct
  source 1..20: mol_type = other DNA
agcaacaatctgagacacat

SEQ ID NO: 27582 - DNA, 20 bp, synthetic construct
  source 1..20: mol_type = other DNA
ggggtctgggggtgacattg

SEQ ID NO: 27583 - DNA, 20 bp, synthetic construct
  source 1..20: mol_type = other DNA
aaagtactactgaacaaagt

SEQ ID NO: 27584 - DNA, 20 bp, synthetic construct
  source 1..20: mol_type = other DNA
ctggtagtcctccggcccct

SEQ ID NO: 27585 - DNA, 20 bp, synthetic construct
  source 1..20: mol_type = other DNA
tagtgctatcttaataatta

SEQ ID NO: 27586 - DNA, 20 bp, synthetic construct
  source 1..20: mol_type = other DNA
taagactggaggaggaggag

SEQ ID NO: 27587 - DNA, 20 bp, synthetic construct
  source 1..20: mol_type = other DNA
ttgagaataggtaagtttct

SEQ ID NO: 27588 - DNA, 20 bp, synthetic construct
  source 1..20: mol_type = other DNA
gctgaagaaggctctgtgca

SEQ ID NO: 27589 - DNA, 20 bp, synthetic construct
  source 1..20: mol_type = other DNA
cagccaggaatataagctat

SEQ ID NO: 27590 - DNA, 20 bp, synthetic construct
  source 1..20: mol_type = other DNA
aagaactgtcgcgcaacttc

SEQ ID NO: 27591 - DNA, 20 bp, synthetic construct
  source 1..20: mol_type = other DNA
gtttttatattcgaagtagg

SEQ ID NO: 27592 - DNA, 20 bp, synthetic construct
  source 1..20: mol_type = other DNA
ctgcgcccaggtcctcccct

SEQ ID NO: 27593 - DNA, 20 bp, synthetic construct
  source 1..20: mol_type = other DNA
taataaatttaagagcagac

SEQ ID NO: 27594 - DNA, 20 bp, synthetic construct
  source 1..20: mol_type = other DNA
ctttctttcgattatcatca

SEQ ID NO: 27595 - DNA, 20 bp, synthetic construct
  source 1..20: mol_type = other DNA
tacaacagcgattatcatca

SEQ ID NO: 27596 - DNA, 20 bp, synthetic construct
  source 1..20: mol_type = other DNA
acgcggtctttctctagacg

SEQ ID NO: 27597 - DNA, 20 bp, synthetic construct
  source 1..20: mol_type = other DNA
gccagacctttgtaacaccc

SEQ ID NO: 27598 - DNA, 20 bp, synthetic construct
  source 1..20: mol_type = other DNA
aaagcgaattcatggggtct

SEQ ID NO: 27599 - DNA, 20 bp, synthetic construct
  source 1..20: mol_type = other DNA
gcgccgcggctcagggagga

SEQ ID NO: 27600 - DNA, 20 bp, synthetic construct
  source 1..20: mol_type = other DNA
actagtcactatacaataat

SEQ ID NO: 27601 - DNA, 20 bp, synthetic construct
  source 1..20: mol_type = other DNA
ctcttggaacaagataagac

SEQ ID NO: 27602 - DNA, 20 bp, synthetic construct
  source 1..20: mol_type = other DNA
actggtcccaggaccggcag

SEQ ID NO: 27603 - DNA, 20 bp, synthetic construct
  source 1..20: mol_type = other DNA
cttcgagatagccgccagga

SEQ ID NO: 27604 - DNA, 20 bp, synthetic construct
  source 1..20: mol_type = other DNA
gccaccttcctaatgtgttc

SEQ ID NO: 27605 - DNA, 20 bp, synthetic construct
  source 1..20: mol_type = other DNA
cagcgattccagaacaacat

SEQ ID NO: 27606 - DNA, 20 bp, synthetic construct
  source 1..20: mol_type = other DNA
acttggatttgatcttaatc

SEQ ID NO: 27607 - DNA, 20 bp, synthetic construct
  source 1..20: mol_type = other DNA
ttcacggtcgaacgagtatc

SEQ ID NO: 27608 - DNA, 20 bp, synthetic construct
  source 1..20: mol_type = other DNA
ttagcgcctaactgagcgtc

SEQ ID NO: 27609 - DNA, 20 bp, synthetic construct
  source 1..20: mol_type = other DNA
gaataacaactatgaacagg

SEQ ID NO: 27610 - DNA, 20 bp, synthetic construct
  source 1..20: mol_type = other DNA
gaataacagtctcttgacta

SEQ ID NO: 27611 - DNA, 20 bp, synthetic construct
  source 1..20: mol_type = other DNA
ccccgggtcaattcttggtt

SEQ ID NO: 27612 - DNA, 20 bp, synthetic construct
  source 1..20: mol_type = other DNA
tatgaaaacaattcttggtt

SEQ ID NO: 27613 - DNA, 20 bp, synthetic construct
  source 1..20: mol_type = other DNA
tctgggatataagaggcagc

SEQ ID NO: 27614 - DNA, 20 bp, synthetic construct
  source 1..20: mol_type = other DNA
gatggcggacgaagaggccg

SEQ ID NO: 27615 - DNA, 20 bp, synthetic construct
  source 1..20: mol_type = other DNA
gggcctcgctcaccggcggt

SEQ ID NO: 27616 - DNA, 20 bp, synthetic construct
  source 1..20: mol_type = other DNA
acgacgccgactaacgcccc

SEQ ID NO: 27617 - DNA, 20 bp, synthetic construct
  source 1..20: mol_type = other DNA
ttgttcgtcacttgtcgaca

SEQ ID NO: 27618 - DNA, 20 bp, synthetic construct
  source 1..20: mol_type = other DNA
gcgccctctcaccgcccggc

SEQ ID NO: 27619 - DNA, 20 bp, synthetic construct
  source 1..20: mol_type = other DNA
tgcgtgtttgtgattaacta

SEQ ID NO: 27620 - DNA, 20 bp, synthetic construct
  source 1..20: mol_type = other DNA
ttgctcgcgccccaaaaaca

SEQ ID NO: 27621 - DNA, 20 bp, synthetic construct
  source 1..20: mol_type = other DNA
atgttggatggcagccttga

SEQ ID NO: 27622 - DNA, 20 bp, synthetic construct
  source 1..20: mol_type = other DNA
gctgctccattgcaatgctc

SEQ ID NO: 27623 - DNA, 20 bp, synthetic construct
  source 1..20: mol_type = other DNA
gctgctcctggcagccttga

SEQ ID NO: 27624 - DNA, 20 bp, synthetic construct
  source 1..20: mol_type = other DNA
tctgtgacttcgggtccgta

SEQ ID NO: 27625 - DNA, 20 bp, synthetic construct
  source 1..20: mol_type = other DNA
ggcgcgctggagcgttttcc

SEQ ID NO: 27626 - DNA, 20 bp, synthetic construct
  source 1..20: mol_type = other DNA
cgtaacccaatgtgtatcta

SEQ ID NO: 27627 - DNA, 20 bp, synthetic construct
  source 1..20: mol_type = other DNA
gacacatgtctccgcccctg

SEQ ID NO: 27628 - DNA, 20 bp, synthetic construct
  source 1..20: mol_type = other DNA
cagcaccgaatgtcaagatt

SEQ ID NO: 27629 - DNA, 20 bp, synthetic construct
  source 1..20: mol_type = other DNA
attttgactggaatttcgga

SEQ ID NO: 27630 - DNA, 20 bp, synthetic construct
  source 1..20: mol_type = other DNA
ccggggcgaagggtatgtgg

SEQ ID NO: 27631 - DNA, 20 bp, synthetic construct
  source 1..20: mol_type = other DNA
ctttgtttcacttgccatat

SEQ ID NO: 27632 - DNA, 20 bp, synthetic construct
  source 1..20: mol_type = other DNA
attattaaacatccaatttg

SEQ ID NO: 27633 - DNA, 20 bp, synthetic construct
  source 1..20: mol_type = other DNA
ttgctcgctcagcacaggat

SEQ ID NO: 27634 - DNA, 20 bp, synthetic construct
  source 1..20: mol_type = other DNA
ccgctgcaggcccgcgcccg

SEQ ID NO: 27635 - DNA, 20 bp, synthetic construct
  source 1..20: mol_type = other DNA
tcaacaccgacttaggttca

SEQ ID NO: 27636 - DNA, 20 bp, synthetic construct
  source 1..20: mol_type = other DNA
agtgtcctatttaaaatggg

SEQ ID NO: 27637 - DNA, 20 bp, synthetic construct
  source 1..20: mol_type = other DNA
catacccaataaaagattat

SEQ ID NO: 27638 - DNA, 20 bp, synthetic construct
  source 1..20: mol_type = other DNA
catacccatccgtctcaggg

SEQ ID NO: 27639 - DNA, 20 bp, synthetic construct
  source 1..20: mol_type = other DNA
gagcatcttcattataatca

SEQ ID NO: 27640 - DNA, 20 bp, synthetic construct
  source 1..20: mol_type = other DNA
ccgcagaaggttgtcctgta

SEQ ID NO: 27641 - DNA, 20 bp, synthetic construct
  source 1..20: mol_type = other DNA
agtatccgcagcagatgtgc

SEQ ID NO: 27642 - DNA, 20 bp, synthetic construct
  source 1..20: mol_type = other DNA
agtatccgggttgtcctgta

SEQ ID NO: 27643 - DNA, 20 bp, synthetic construct
  source 1..20: mol_type = other DNA
cggcgcgaagcctgcgattc

SEQ ID NO: 27644 - DNA, 20 bp, synthetic construct
  source 1..20: mol_type = other DNA
gtgctgtgtgtcctagtcta

SEQ ID NO: 27645 - DNA, 20 bp, synthetic construct
  source 1..20: mol_type = other DNA
acaacagctgtcctagtcta

SEQ ID NO: 27646 - DNA, 20 bp, synthetic construct
  source 1..20: mol_type = other DNA
ctcccggtgcttaatgcatt

SEQ ID NO: 27647 - DNA, 20 bp, synthetic construct
  source 1..20: mol_type = other DNA
tccgccactccggtaggatt

SEQ ID NO: 27648 - DNA, 20 bp, synthetic construct
  source 1..20: mol_type = other DNA
gagcgttttcccagtcggcc

SEQ ID NO: 27649 - DNA, 20 bp, synthetic construct
  source 1..20: mol_type = other DNA
gggccgaggtaccaaaggcg

SEQ ID NO: 27650 - DNA, 20 bp, synthetic construct
  source 1..20: mol_type = other DNA
attatttagtaccaaaggcg

SEQ ID NO: 27651 - DNA, 20 bp, synthetic construct
  source 1..20: mol_type = other DNA
tctccaagtcccccggtctc

SEQ ID NO: 27652 - DNA, 20 bp, synthetic construct
  source 1..20: mol_type = other DNA
gaaagtgctcccccggtctc

SEQ ID NO: 27653 - DNA, 20 bp, synthetic construct
  source 1..20: mol_type = other DNA
tcgtggaagatagtctccac

SEQ ID NO: 27654 - DNA, 20 bp, synthetic construct
  source 1..20: mol_type = other DNA
tcgtggaaacatacaagaca

SEQ ID NO: 27655 - DNA, 20 bp, synthetic construct
  source 1..20: mol_type = other DNA
ctgcctatgggcgaagtcaa

SEQ ID NO: 27656 - DNA, 20 bp, synthetic construct
  source 1..20: mol_type = other DNA
aactaagggggcgaagtcaa

SEQ ID NO: 27657 - DNA, 20 bp, synthetic construct
  source 1..20: mol_type = other DNA
caaactccgctattctgccc

SEQ ID NO: 27658 - DNA, 20 bp, synthetic construct
  source 1..20: mol_type = other DNA
tgacgctcgcgtgatgacaa

SEQ ID NO: 27659 - DNA, 20 bp, synthetic construct
  source 1..20: mol_type = other DNA
atggcagagcaaaaatgtaa

SEQ ID NO: 27660 - DNA, 20 bp, synthetic construct
  source 1..20: mol_type = other DNA
ctcaacagagccaacatttc

SEQ ID NO: 27661 - DNA, 20 bp, synthetic construct
  source 1..20: mol_type = other DNA
gaatctgcagccaacatttc

SEQ ID NO: 27662 - DNA, 20 bp, synthetic construct
  source 1..20: mol_type = other DNA
acaggagacgtcgaacttcg

SEQ ID NO: 27663 - DNA, 20 bp, synthetic construct
  source 1..20: mol_type = other DNA
acaggagagcgtactgcggt

SEQ ID NO: 27664 - DNA, 20 bp, synthetic construct
  source 1..20: mol_type = other DNA
ggcacgccgcgtactgcggt

SEQ ID NO: 27665 - DNA, 20 bp, synthetic construct
  source 1..20: mol_type = other DNA
cctttgggggctacctggct

SEQ ID NO: 27666 - DNA, 20 bp, synthetic construct
  source 1..20: mol_type = other DNA
cctttgggttgccatcagcg

SEQ ID NO: 27667 - DNA, 20 bp, synthetic construct
  source 1..20: mol_type = other DNA
cctgtgagactgcagccctg

SEQ ID NO: 27668 - DNA, 20 bp, synthetic construct
  source 1..20: mol_type = other DNA
cagatgacaacaccgtccac

SEQ ID NO: 27669 - DNA, 20 bp, synthetic construct
  source 1..20: mol_type = other DNA
atgattccctactgcgagaa

SEQ ID NO: 27670 - DNA, 20 bp, synthetic construct
  source 1..20: mol_type = other DNA
tgagtgccacaagaccaaag

SEQ ID NO: 27671 - DNA, 20 bp, synthetic construct
  source 1..20: mol_type = other DNA
aacaactaacaagaccaaag

SEQ ID NO: 27672 - DNA, 20 bp, synthetic construct
  source 1..20: mol_type = other DNA
taatttaggcattggaggag

SEQ ID NO: 27673 - DNA, 20 bp, synthetic construct
  source 1..20: mol_type = other DNA
cctaaactgcattggaggag

SEQ ID NO: 27674 - DNA, 20 bp, synthetic construct
  source 1..20: mol_type = other DNA
gcttcccactgcctagttca

SEQ ID NO: 27675 - DNA, 20 bp, synthetic construct
  source 1..20: mol_type = other DNA
ccacccccctttggatcttg

SEQ ID NO: 27676 - DNA, 20 bp, synthetic construct
  source 1..20: mol_type = other DNA
gtgcgcgagacgccgccgag

SEQ ID NO: 27677 - DNA, 20 bp, synthetic construct
  source 1..20: mol_type = other DNA
aaggagagacagtagctgat

SEQ ID NO: 27678 - DNA, 20 bp, synthetic construct
  source 1..20: mol_type = other DNA
aaggagagcattagaaaatg

SEQ ID NO: 27679 - DNA, 20 bp, synthetic construct
  source 1..20: mol_type = other DNA
acacgaaaccaaccttcaca

SEQ ID NO: 27680 - DNA, 20 bp, synthetic construct
  source 1..20: mol_type = other DNA
caatgcaataattaatcctt

SEQ ID NO: 27681 - DNA, 20 bp, synthetic construct
  source 1..20: mol_type = other DNA
ggagccaccggagccccggc

SEQ ID NO: 27682 - DNA, 20 bp, synthetic construct
  source 1..20: mol_type = other DNA
ctggccaccggagccccggc

SEQ ID NO: 27683 - DNA, 20 bp, synthetic construct
  source 1..20: mol_type = other DNA
aacccttgacaagaggacca

SEQ ID NO: 27684 - DNA, 20 bp, synthetic construct
  source 1..20: mol_type = other DNA
atactggataccaggagtta

SEQ ID NO: 27685 - DNA, 20 bp, synthetic construct
  source 1..20: mol_type = other DNA
ccgcgcgcgcgcgcgggctt

SEQ ID NO: 27686 - DNA, 20 bp, synthetic construct
  source 1..20: mol_type = other DNA
accccgaggtaacacgcgac

SEQ ID NO: 27687 - DNA, 20 bp, synthetic construct
  source 1..20: mol_type = other DNA
gaggttttgtaacacgcgac

SEQ ID NO: 27688 - DNA, 20 bp, synthetic construct
  source 1..20: mol_type = other DNA
agcgaatgtctctcctggga

SEQ ID NO: 27689 - DNA, 20 bp, synthetic construct
  source 1..20: mol_type = other DNA
agacaaatcaaactagactc

SEQ ID NO: 27690 - DNA, 20 bp, synthetic construct
  source 1..20: mol_type = other DNA
agacaaatttcgggctcgga

SEQ ID NO: 27691 - DNA, 20 bp, synthetic construct
  source 1..20: mol_type = other DNA
tgcaaatgtgccgtttccct

SEQ ID NO: 27692 - DNA, 20 bp, synthetic construct
  source 1..20: mol_type = other DNA
agatggcgccggtttactgg

SEQ ID NO: 27693 - DNA, 20 bp, synthetic construct
  source 1..20: mol_type = other DNA
agatggcggacaacatgacc

SEQ ID NO: 27694 - DNA, 20 bp, synthetic construct
  source 1..20: mol_type = other DNA
cgatcacatcattttcccaa

SEQ ID NO: 27695 - DNA, 20 bp, synthetic construct
  source 1..20: mol_type = other DNA
tgggaggcaacccagacaca

SEQ ID NO: 27696 - DNA, 20 bp, synthetic construct
  source 1..20: mol_type = other DNA
tgggaggccgtgggctggac

SEQ ID NO: 27697 - DNA, 20 bp, synthetic construct
  source 1..20: mol_type = other DNA
ggcaggcgcgggagcagcac

SEQ ID NO: 27698 - DNA, 20 bp, synthetic construct
  source 1..20: mol_type = other DNA
ccaggactggtctgagaggg

SEQ ID NO: 27699 - DNA, 20 bp, synthetic construct
  source 1..20: mol_type = other DNA
cagactgtcagataaatcgg

SEQ ID NO: 27700 - DNA, 20 bp, synthetic construct
  source 1..20: mol_type = other DNA
tgccctaccgttgcgtgagg

SEQ ID NO: 27701 - DNA, 20 bp, synthetic construct
  source 1..20: mol_type = other DNA
gtagtgggcgttgcgtgagg

SEQ ID NO: 27702 - DNA, 20 bp, synthetic construct
  source 1..20: mol_type = other DNA
gtagtggggagacaaactca

SEQ ID NO: 27703 - DNA, 20 bp, synthetic construct
  source 1..20: mol_type = other DNA
gtaggggaccaacacgtagg

SEQ ID NO: 27704 - DNA, 20 bp, synthetic construct
  source 1..20: mol_type = other DNA
tctaccccccaacacgtagg

SEQ ID NO: 27705 - DNA, 20 bp, synthetic construct
  source 1..20: mol_type = other DNA
gcctccacgcccaccacctc

SEQ ID NO: 27706 - DNA, 20 bp, synthetic construct
  source 1..20: mol_type = other DNA
taagccctgagtacagggta

SEQ ID NO: 27707 - DNA, 20 bp, synthetic construct
  source 1..20: mol_type = other DNA
gctgaagccgctgcccctgc

SEQ ID NO: 27708 - DNA, 20 bp, synthetic construct
  source 1..20: mol_type = other DNA
ccggagagcgccagggcctg

SEQ ID NO: 27709 - DNA, 20 bp, synthetic construct
  source 1..20: mol_type = other DNA
atgtggagttcgacattagg

SEQ ID NO: 27710 - DNA, 20 bp, synthetic construct
  source 1..20: mol_type = other DNA
atgtggagttcgacggtagg

SEQ ID NO: 27711 - DNA, 20 bp, synthetic construct
  source 1..20: mol_type = other DNA
atgtggagtttcctcccagg

SEQ ID NO: 27712 - DNA, 20 bp, synthetic construct
  source 1..20: mol_type = other DNA
tgtctttctttcctcccagg

SEQ ID NO: 27713 - DNA, 20 bp, synthetic construct
  source 1..20: mol_type = other DNA
gcaaggcagtggcggcggcc

SEQ ID NO: 27714 - DNA, 20 bp, synthetic construct
  source 1..20: mol_type = other DNA
caggctgggtggcggcggcc

SEQ ID NO: 27715 - DNA, 20 bp, synthetic construct
  source 1..20: mol_type = other DNA
gcaaggcatctctccattta

SEQ ID NO: 27716 - DNA, 20 bp, synthetic construct
  source 1..20: mol_type = other DNA
gcatgggcacctgaaggtct

SEQ ID NO: 27717 - DNA, 20 bp, synthetic construct
  source 1..20: mol_type = other DNA
gcatgggccaggaggccatg

SEQ ID NO: 27718 - DNA, 20 bp, synthetic construct
  source 1..20: mol_type = other DNA
tagctattcaggaggccatg

SEQ ID NO: 27719 - DNA, 20 bp, synthetic construct
  source 1..20: mol_type = other DNA
ggtaaaataagggtatgtgg

SEQ ID NO: 27720 - DNA, 20 bp, synthetic construct
  source 1..20: mol_type = other DNA
ggatgaagaagaaaacccgg

SEQ ID NO: 27721 - DNA, 20 bp, synthetic construct
  source 1..20: mol_type = other DNA
aagaactacggaacctgatg

SEQ ID NO: 27722 - DNA, 20 bp, synthetic construct
  source 1..20: mol_type = other DNA
aagaactagcccgatctgct

SEQ ID NO: 27723 - DNA, 20 bp, synthetic construct
  source 1..20: mol_type = other DNA
cagtctctcgtcatttggtg

SEQ ID NO: 27724 - DNA, 20 bp, synthetic construct
  source 1..20: mol_type = other DNA
gggaagcggagccaacatgc

SEQ ID NO: 27725 - DNA, 20 bp, synthetic construct
  source 1..20: mol_type = other DNA
attgaatcccgcttcccctt

SEQ ID NO: 27726 - DNA, 20 bp, synthetic construct
  source 1..20: mol_type = other DNA
gcagagaagcagaggaccaa

SEQ ID NO: 27727 - DNA, 20 bp, synthetic construct
  source 1..20: mol_type = other DNA
gcggaggcttccggcggaaa

SEQ ID NO: 27728 - DNA, 20 bp, synthetic construct
  source 1..20: mol_type = other DNA
aattctctttccggcggaaa

SEQ ID NO: 27729 - DNA, 20 bp, synthetic construct
  source 1..20: mol_type = other DNA
tgaatcatttcttcacatca

SEQ ID NO: 27730 - DNA, 20 bp, synthetic construct
  source 1..20: mol_type = other DNA
taaaaatcacctggaccaat

SEQ ID NO: 27731 - DNA, 20 bp, synthetic construct
  source 1..20: mol_type = other DNA
ctgaatttctaaatacaaga

SEQ ID NO: 27732 - DNA, 20 bp, synthetic construct
  source 1..20: mol_type = other DNA
gaacgttttcccctcctgga

SEQ ID NO: 27733 - DNA, 20 bp, synthetic construct
  source 1..20: mol_type = other DNA
ccccaatcttaaattagggc

SEQ ID NO: 27734 - DNA, 20 bp, synthetic construct
  source 1..20: mol_type = other DNA
gggtttctttaaattagggc

SEQ ID NO: 27735 - DNA, 20 bp, synthetic construct
  source 1..20: mol_type = other DNA
cactaatacagtgtgtggag

SEQ ID NO: 27736 - DNA, 20 bp, synthetic construct
  source 1..20: mol_type = other DNA
cggctgcctctccgcccctg

SEQ ID NO: 27737 - DNA, 20 bp, synthetic construct
  source 1..20: mol_type = other DNA
caaggtcatacatgaaatca

SEQ ID NO: 27738 - DNA, 20 bp, synthetic construct
  source 1..20: mol_type = other DNA
ttcccgtaggggccgtcggc

SEQ ID NO: 27739 - DNA, 20 bp, synthetic construct
  source 1..20: mol_type = other DNA
ttcggctgagacacgtccca

SEQ ID NO: 27740 - DNA, 20 bp, synthetic construct
  source 1..20: mol_type = other DNA
gtagcagcggggaggccggg

SEQ ID NO: 27741 - DNA, 20 bp, synthetic construct
  source 1..20: mol_type = other DNA
gtagcagctactgataaccc

SEQ ID NO: 27742 - DNA, 20 bp, synthetic construct
  source 1..20: mol_type = other DNA
tggcccactcctagtcccta

SEQ ID NO: 27743 - DNA, 20 bp, synthetic construct
  source 1..20: mol_type = other DNA
tgttaggattccagaacctt

SEQ ID NO: 27744 - DNA, 20 bp, synthetic construct
  source 1..20: mol_type = other DNA
tgttaggaaagggcgtgtgg

SEQ ID NO: 27745 - DNA, 20 bp, synthetic construct
  source 1..20: mol_type = other DNA
tcctgaccagagggtcttct

SEQ ID NO: 27746 - DNA, 20 bp, synthetic construct
  source 1..20: mol_type = other DNA
agcaggaaactcagttcttc

SEQ ID NO: 27747 - DNA, 20 bp, synthetic construct
  source 1..20: mol_type = other DNA
gtggtttcactcagttcttc

SEQ ID NO: 27748 - DNA, 20 bp, synthetic construct
  source 1..20: mol_type = other DNA
gtggctcttgccctttagac

SEQ ID NO: 27749 - DNA, 20 bp, synthetic construct
  source 1..20: mol_type = other DNA
catatgtctgccctttagac

SEQ ID NO: 27750 - DNA, 20 bp, synthetic construct
  source 1..20: mol_type = other DNA
ccagcctctccgcatcttga

SEQ ID NO: 27751 - DNA, 20 bp, synthetic construct
  source 1..20: mol_type = other DNA
ggacaaggtgccctatttag

SEQ ID NO: 27752 - DNA, 20 bp, synthetic construct
  source 1..20: mol_type = other DNA
ggtcgaggtgccctatttag

SEQ ID NO: 27753 - DNA, 20 bp, synthetic construct
  source 1..20: mol_type = other DNA
tcctcccctgccctatttag

SEQ ID NO: 27754 - DNA, 20 bp, synthetic construct
  source 1..20: mol_type = other DNA
ggtctaggtgccctatttag

SEQ ID NO: 27755 - DNA, 20 bp, synthetic construct
  source 1..20: mol_type = other DNA
ctgtggcacagtagactgta

SEQ ID NO: 27756 - DNA, 20 bp, synthetic construct
  source 1..20: mol_type = other DNA
cgcactcgatccacgctggc

SEQ ID NO: 27757 - DNA, 20 bp, synthetic construct
  source 1..20: mol_type = other DNA
acggcgacagattgtgaggt

SEQ ID NO: 27758 - DNA, 20 bp, synthetic construct
  source 1..20: mol_type = other DNA
acggcgactttactgcgaaa

SEQ ID NO: 27759 - DNA, 20 bp, synthetic construct
  source 1..20: mol_type = other DNA
cgatgttgtttactgcgaaa

SEQ ID NO: 27760 - DNA, 20 bp, synthetic construct
  source 1..20: mol_type = other DNA
ccgtgaccgacctatcaggt

SEQ ID NO: 27761 - DNA, 20 bp, synthetic construct
  source 1..20: mol_type = other DNA
ccgtgacctggggcaaccca

SEQ ID NO: 27762 - DNA, 20 bp, synthetic construct
  source 1..20: mol_type = other DNA
caagattcagaccagtgttt

SEQ ID NO: 27763 - DNA, 20 bp, synthetic construct
  source 1..20: mol_type = other DNA
atatttgtttaatgaatgtg

SEQ ID NO: 27764 - DNA, 20 bp, synthetic construct
  source 1..20: mol_type = other DNA
tctattggttggcgtttgtt

SEQ ID NO: 27765 - DNA, 20 bp, synthetic construct
  source 1..20: mol_type = other DNA
ccccctcgcttcgagcctgt

SEQ ID NO: 27766 - DNA, 20 bp, synthetic construct
  source 1..20: mol_type = other DNA
agttagactccaagaatgca

SEQ ID NO: 27767 - DNA, 20 bp, synthetic construct
  source 1..20: mol_type = other DNA
ttccagcagccgaagacacc

SEQ ID NO: 27768 - DNA, 20 bp, synthetic construct
  source 1..20: mol_type = other DNA
ccagcatggccgaagacacc

SEQ ID NO: 27769 - DNA, 20 bp, synthetic construct
  source 1..20: mol_type = other DNA
ttctctaagcctggaagtgc

SEQ ID NO: 27770 - DNA, 20 bp, synthetic construct
  source 1..20: mol_type = other DNA
cctatggggcctggaagtgc

SEQ ID NO: 27771 - DNA, 20 bp, synthetic construct
  source 1..20: mol_type = other DNA
ctcccagagcgcccggggcc

SEQ ID NO: 27772 - DNA, 20 bp, synthetic construct
  source 1..20: mol_type = other DNA
gatggcggctcccagactat

SEQ ID NO: 27773 - DNA, 20 bp, synthetic construct
  source 1..20: mol_type = other DNA
ggcagatgatttctggcctc

SEQ ID NO: 27774 - DNA, 20 bp, synthetic construct
  source 1..20: mol_type = other DNA
ctcttgctttacggcaggtg

SEQ ID NO: 27775 - DNA, 20 bp, synthetic construct
  source 1..20: mol_type = other DNA
tttcactgggtcgccatctt

SEQ ID NO: 27776 - DNA, 20 bp, synthetic construct
  source 1..20: mol_type = other DNA
gcagcagcccaacaatctcc

SEQ ID NO: 27777 - DNA, 20 bp, synthetic construct
  source 1..20: mol_type = other DNA
gcagcagcggtcgccatctt

SEQ ID NO: 27778 - DNA, 20 bp, synthetic construct
  source 1..20: mol_type = other DNA
tcctccggaagaccaggggc

SEQ ID NO: 27779 - DNA, 20 bp, synthetic construct
  source 1..20: mol_type = other DNA
cataagttaagaccaggggc

SEQ ID NO: 27780 - DNA, 20 bp, synthetic construct
  source 1..20: mol_type = other DNA
tcctccgggttcggttcctg

SEQ ID NO: 27781 - DNA, 20 bp, synthetic construct
  source 1..20: mol_type = other DNA
ctcgccgtaatagtccgacc

SEQ ID NO: 27782 - DNA, 20 bp, synthetic construct
  source 1..20: mol_type = other DNA
acgcaaacccattaaatttc

SEQ ID NO: 27783 - DNA, 20 bp, synthetic construct
  source 1..20: mol_type = other DNA
aggcccctgaacgtgtatgt

SEQ ID NO: 27784 - DNA, 20 bp, synthetic construct
  source 1..20: mol_type = other DNA
caacaaagggaagaccgacg

SEQ ID NO: 27785 - DNA, 20 bp, synthetic construct
  source 1..20: mol_type = other DNA
tgtggcttatgtccttcggt

SEQ ID NO: 27786 - DNA, 20 bp, synthetic construct
  source 1..20: mol_type = other DNA
tgtggcttggaagaccgacg

SEQ ID NO: 27787 - DNA, 20 bp, synthetic construct
  source 1..20: mol_type = other DNA
tagacgcgcctgggatgggc

SEQ ID NO: 27788 - DNA, 20 bp, synthetic construct
  source 1..20: mol_type = other DNA
gcttataaaagccctactag

SEQ ID NO: 27789 - DNA, 20 bp, synthetic construct
  source 1..20: mol_type = other DNA
ctctcacatccaggacgacc

SEQ ID NO: 27790 - DNA, 20 bp, synthetic construct
  source 1..20: mol_type = other DNA
taaccgagtgtcgccccccg

SEQ ID NO: 27791 - DNA, 20 bp, synthetic construct
  source 1..20: mol_type = other DNA
atggggggccccggccttac

SEQ ID NO: 27792 - DNA, 20 bp, synthetic construct
  source 1..20: mol_type = other DNA
tataaactccccggccttac

SEQ ID NO: 27793 - DNA, 20 bp, synthetic construct
  source 1..20: mol_type = other DNA
ccgcaggtaacaagagacac

SEQ ID NO: 27794 - DNA, 20 bp, synthetic construct
  source 1..20: mol_type = other DNA
cacagcatccgagccctcta

SEQ ID NO: 27795 - DNA, 20 bp, synthetic construct
  source 1..20: mol_type = other DNA
tctgcatcgaaaactctccg

SEQ ID NO: 27796 - DNA, 20 bp, synthetic construct
  source 1..20: mol_type = other DNA
cctaggaggaggggaggcgg

SEQ ID NO: 27797 - DNA, 20 bp, synthetic construct
  source 1..20: mol_type = other DNA
cgaccttgacggggtgctgg

SEQ ID NO: 27798 - DNA, 20 bp, synthetic construct
  source 1..20: mol_type = other DNA
cgaccttgcaaattaaaata

SEQ ID NO: 27799 - DNA, 20 bp, synthetic construct
  source 1..20: mol_type = other DNA
atttgactacggggtgctgg

SEQ ID NO: 27800 - DNA, 20 bp, synthetic construct
  source 1..20: mol_type = other DNA
tccgccaccagccctacgag

SEQ ID NO: 27801 - DNA, 20 bp, synthetic construct
  source 1..20: mol_type = other DNA
cattgatgtccggtaggatt

SEQ ID NO: 27802 - DNA, 20 bp, synthetic construct
  source 1..20: mol_type = other DNA
tctgaacttgaagcctggag

SEQ ID NO: 27803 - DNA, 20 bp, synthetic construct
  source 1..20: mol_type = other DNA
ctgggcgcctgggacccgcc

SEQ ID NO: 27804 - DNA, 20 bp, synthetic construct
  source 1..20: mol_type = other DNA
ctgggcgcggttcgtatagg

SEQ ID NO: 27805 - DNA, 20 bp, synthetic construct
  source 1..20: mol_type = other DNA
agggctagggcttcctgaac

SEQ ID NO: 27806 - DNA, 20 bp, synthetic construct
  source 1..20: mol_type = other DNA
aaaacttaggatccaagacc

SEQ ID NO: 27807 - DNA, 20 bp, synthetic construct
  source 1..20: mol_type = other DNA
taaacaagttaggcaacgcg

SEQ ID NO: 27808 - DNA, 20 bp, synthetic construct
  source 1..20: mol_type = other DNA
atccatcagggcatccaaat

SEQ ID NO: 27809 - DNA, 20 bp, synthetic construct
  source 1..20: mol_type = other DNA
ttcacggccagtttccattg

SEQ ID NO: 27810 - DNA, 20 bp, synthetic construct
  source 1..20: mol_type = other DNA
aagcgatgcagtttccattg

SEQ ID NO: 27811 - DNA, 20 bp, synthetic construct
  source 1..20: mol_type = other DNA
aagcgatgtgccacgggcga

SEQ ID NO: 27812 - DNA, 20 bp, synthetic construct
  source 1..20: mol_type = other DNA
cgttgggcgcatctcctgga

SEQ ID NO: 27813 - DNA, 20 bp, synthetic construct
  source 1..20: mol_type = other DNA
gaggacacgaccccagggca

SEQ ID NO: 27814 - DNA, 20 bp, synthetic construct
  source 1..20: mol_type = other DNA
gtgagtatgttgctattatg

SEQ ID NO: 27815 - DNA, 20 bp, synthetic construct
  source 1..20: mol_type = other DNA
gttcagcatgtgggctcaaa

SEQ ID NO: 27816 - DNA, 20 bp, synthetic construct
  source 1..20: mol_type = other DNA
ctggcagatgaggctagaaa

SEQ ID NO: 27817 - DNA, 20 bp, synthetic construct
  source 1..20: mol_type = other DNA
gataggcggagcatctagtt

SEQ ID NO: 27818 - DNA, 20 bp, synthetic construct
  source 1..20: mol_type = other DNA
acttttcagccgcggcccgg

SEQ ID NO: 27819 - DNA, 20 bp, synthetic construct
  source 1..20: mol_type = other DNA
tgaaacacgccgcggcccgg

SEQ ID NO: 27820 - DNA, 20 bp, synthetic construct
  source 1..20: mol_type = other DNA
gcagacgcccccggagtcgc

SEQ ID NO: 27821 - DNA, 20 bp, synthetic construct
  source 1..20: mol_type = other DNA
cgcgaagattccccctctgc

SEQ ID NO: 27822 - DNA, 20 bp, synthetic construct
  source 1..20: mol_type = other DNA
gccggtcacgtggggggcga

SEQ ID NO: 27823 - DNA, 20 bp, synthetic construct
  source 1..20: mol_type = other DNA
tcggttccagaagggagagg

SEQ ID NO: 27824 - DNA, 20 bp, synthetic construct
  source 1..20: mol_type = other DNA
tcggttcctccctcttagtt

SEQ ID NO: 27825 - DNA, 20 bp, synthetic construct
  source 1..20: mol_type = other DNA
gtaaagttagaagggagagg

SEQ ID NO: 27826 - DNA, 20 bp, synthetic construct
  source 1..20: mol_type = other DNA
tgtttttggcgcgtgagctc

SEQ ID NO: 27827 - DNA, 20 bp, synthetic construct
  source 1..20: mol_type = other DNA
cgcggctgtaaagtatagag

SEQ ID NO: 27828 - DNA, 20 bp, synthetic construct
  source 1..20: mol_type = other DNA
agcaagagtgggaggcgcgc

SEQ ID NO: 27829 - DNA, 20 bp, synthetic construct
  source 1..20: mol_type = other DNA
ccctgcagccctcgcctggg

SEQ ID NO: 27830 - DNA, 20 bp, synthetic construct
  source 1..20: mol_type = other DNA
tagatcaagtcgggccagct

SEQ ID NO: 27831 - DNA, 20 bp, synthetic construct
  source 1..20: mol_type = other DNA
ggcggggcgtcgggccagct

SEQ ID NO: 27832 - DNA, 20 bp, synthetic construct
  source 1..20: mol_type = other DNA
cctggtggggacagcagcca

SEQ ID NO: 27833 - DNA, 20 bp, synthetic construct
  source 1..20: mol_type = other DNA
atgcgctgactgagaagaaa

SEQ ID NO: 27834 - DNA, 20 bp, synthetic construct
  source 1..20: mol_type = other DNA
atgcgctgactgagtcctcc

SEQ ID NO: 27835 - DNA, 20 bp, synthetic construct
  source 1..20: mol_type = other DNA
gggaagggagatccggagcg

SEQ ID NO: 27836 - DNA, 20 bp, synthetic construct
  source 1..20: mol_type = other DNA
ggcgcctcgtcaaaggggct

SEQ ID NO: 27837 - DNA, 20 bp, synthetic construct
  source 1..20: mol_type = other DNA
tcaaagaagtcaaaggggct

SEQ ID NO: 27838 - DNA, 20 bp, synthetic construct
  source 1..20: mol_type = other DNA
tcaaagaatgtgtctcaaga

SEQ ID NO: 27839 - DNA, 20 bp, synthetic construct
  source 1..20: mol_type = other DNA
cggaagcttgcttaacacag

SEQ ID NO: 27840 - DNA, 20 bp, synthetic construct
  source 1..20: mol_type = other DNA
ctgcagcggaaccgactact

SEQ ID NO: 27841 - DNA, 20 bp, synthetic construct
  source 1..20: mol_type = other DNA
ggagccgggcggaattgaga

SEQ ID NO: 27842 - DNA, 20 bp, synthetic construct
  source 1..20: mol_type = other DNA
gaggagctgttatcgggact

SEQ ID NO: 27843 - DNA, 20 bp, synthetic construct
  source 1..20: mol_type = other DNA
cctcggtgggagagcagggg

SEQ ID NO: 27844 - DNA, 20 bp, synthetic construct
  source 1..20: mol_type = other DNA
aaggccgtggagagcagggg

SEQ ID NO: 27845 - DNA, 20 bp, synthetic construct
  source 1..20: mol_type = other DNA
cctcggtgcccataacatta

SEQ ID NO: 27846 - DNA, 20 bp, synthetic construct
  source 1..20: mol_type = other DNA
aatggacaaggtgtgaagag

SEQ ID NO: 27847 - DNA, 20 bp, synthetic construct
  source 1..20: mol_type = other DNA
cataaagagcagctggggta

SEQ ID NO: 27848 - DNA, 20 bp, synthetic construct
  source 1..20: mol_type = other DNA
ggccccagctgcgccatcgt

SEQ ID NO: 27849 - DNA, 20 bp, synthetic construct
  source 1..20: mol_type = other DNA
ggccccaggcagctggggta

SEQ ID NO: 27850 - DNA, 20 bp, synthetic construct
  source 1..20: mol_type = other DNA
ttttttggaggcctaggctt

SEQ ID NO: 27851 - DNA, 20 bp, synthetic construct
  source 1..20: mol_type = other DNA
taccccttcctctcggaagg

SEQ ID NO: 27852 - DNA, 20 bp, synthetic construct
  source 1..20: mol_type = other DNA
taccccttgtatatcatgaa

SEQ ID NO: 27853 - DNA, 20 bp, synthetic construct
  source 1..20: mol_type = other DNA
cctcagctcgtcctccccgc

SEQ ID NO: 27854 - DNA, 20 bp, synthetic construct
  source 1..20: mol_type = other DNA
cctcagcttagatcttgtag

SEQ ID NO: 27855 - DNA, 20 bp, synthetic construct
  source 1..20: mol_type = other DNA
gcaatgcagatccagtggtt

SEQ ID NO: 27856 - DNA, 20 bp, synthetic construct
  source 1..20: mol_type = other DNA
acggtcggattagtttgcct

SEQ ID NO: 27857 - DNA, 20 bp, synthetic construct
  source 1..20: mol_type = other DNA
gtttgaatgccctggaagga

SEQ ID NO: 27858 - DNA, 20 bp, synthetic construct
  source 1..20: mol_type = other DNA
tacgacgatctcggcaaaca

SEQ ID NO: 27859 - DNA, 20 bp, synthetic construct
  source 1..20: mol_type = other DNA
cctccgtcgagatcggcgtg

SEQ ID NO: 27860 - DNA, 20 bp, synthetic construct
  source 1..20: mol_type = other DNA
cctccgtctctcggcaaaca

SEQ ID NO: 27861 - DNA, 20 bp, synthetic construct
  source 1..20: mol_type = other DNA
cctccgttgggactaccgca

SEQ ID NO: 27862 - DNA, 20 bp, synthetic construct
  source 1..20: mol_type = other DNA
acaaacagataggttggagc

SEQ ID NO: 27863 - DNA, 20 bp, synthetic construct
  source 1..20: mol_type = other DNA
acaaacagcagatggacgct

SEQ ID NO: 27864 - DNA, 20 bp, synthetic construct
  source 1..20: mol_type = other DNA
ctagccgagtagtgttgggt

SEQ ID NO: 27865 - DNA, 20 bp, synthetic construct
  source 1..20: mol_type = other DNA
gtgtggtccgacacgatggg

SEQ ID NO: 27866 - DNA, 20 bp, synthetic construct
  source 1..20: mol_type = other DNA
gtgtggtcgacacattcacc

SEQ ID NO: 27867 - DNA, 20 bp, synthetic construct
  source 1..20: mol_type = other DNA
cgtctagccatggcgttagt

SEQ ID NO: 27868 - DNA, 20 bp, synthetic construct
  source 1..20: mol_type = other DNA
gtcgggtgcatggcgttagt

SEQ ID NO: 27869 - DNA, 20 bp, synthetic construct
  source 1..20: mol_type = other DNA
tctggctcgcctgcctgcag

SEQ ID NO: 27870 - DNA, 20 bp, synthetic construct
  source 1..20: mol_type = other DNA
ggatcctgttctaaatatcc

SEQ ID NO: 27871 - DNA, 20 bp, synthetic construct
  source 1..20: mol_type = other DNA
gaagtgctctcggcggaagt

SEQ ID NO: 27872 - DNA, 20 bp, synthetic construct
  source 1..20: mol_type = other DNA
tgcatgtggcaggagcggtg

SEQ ID NO: 27873 - DNA, 20 bp, synthetic construct
  source 1..20: mol_type = other DNA
tgcatgtgaggaataattct

SEQ ID NO: 27874 - DNA, 20 bp, synthetic construct
  source 1..20: mol_type = other DNA
aaatacacgcaggagcggtg

SEQ ID NO: 27875 - DNA, 20 bp, synthetic construct
  source 1..20: mol_type = other DNA
gccacagcattcctagactg

SEQ ID NO: 27876 - DNA, 20 bp, synthetic construct
  source 1..20: mol_type = other DNA
gcccatgtcaagattccctg

SEQ ID NO: 27877 - DNA, 20 bp, synthetic construct
  source 1..20: mol_type = other DNA
tttttaaacaagattccctg

SEQ ID NO: 27878 - DNA, 20 bp, synthetic construct
  source 1..20: mol_type = other DNA
accccgctcgcgcgccctcc

SEQ ID NO: 27879 - DNA, 20 bp, synthetic construct
  source 1..20: mol_type = other DNA
cagatcccgcccgcgtcaga

SEQ ID NO: 27880 - DNA, 20 bp, synthetic construct
  source 1..20: mol_type = other DNA
cccttctcgcccgcgtcaga

SEQ ID NO: 27881 - DNA, 20 bp, synthetic construct
  source 1..20: mol_type = other DNA
agagcggtaagatttctgcc

SEQ ID NO: 27882 - DNA, 20 bp, synthetic construct
  source 1..20: mol_type = other DNA
agagcggtaatgaatatccg

SEQ ID NO: 27883 - DNA, 20 bp, synthetic construct
  source 1..20: mol_type = other DNA
cggccggcgttgccggggta

SEQ ID NO: 27884 - DNA, 20 bp, synthetic construct
  source 1..20: mol_type = other DNA
accaaatggttgccggggta

SEQ ID NO: 27885 - DNA, 20 bp, synthetic construct
  source 1..20: mol_type = other DNA
gtatccaaagaagggggtga

SEQ ID NO: 27886 - DNA, 20 bp, synthetic construct
  source 1..20: mol_type = other DNA
tactccgaaccccagaatcc

SEQ ID NO: 27887 - DNA, 20 bp, synthetic construct
  source 1..20: mol_type = other DNA
aggggtagaccccagaatcc

SEQ ID NO: 27888 - DNA, 20 bp, synthetic construct
  source 1..20: mol_type = other DNA
gcctccctctgggcgtccac

SEQ ID NO: 27889 - DNA, 20 bp, synthetic construct
  source 1..20: mol_type = other DNA
ctgccccgccaggcgaagcg

SEQ ID NO: 27890 - DNA, 20 bp, synthetic construct
  source 1..20: mol_type = other DNA
taaatttcccaggcgaagcg

SEQ ID NO: 27891 - DNA, 20 bp, synthetic construct
  source 1..20: mol_type = other DNA
cctcgggactcggcgggtcc

SEQ ID NO: 27892 - DNA, 20 bp, synthetic construct
  source 1..20: mol_type = other DNA
gtgttcatctcggcgggtcc

SEQ ID NO: 27893 - DNA, 20 bp, synthetic construct
  source 1..20: mol_type = other DNA
tgctgctgaggaccttccag

SEQ ID NO: 27894 - DNA, 20 bp, synthetic construct
  source 1..20: mol_type = other DNA
ccgggtgcctaagcaggccc

SEQ ID NO: 27895 - DNA, 20 bp, synthetic construct
  source 1..20: mol_type = other DNA
ggcaccgcctaagcaggccc

SEQ ID NO: 27896 - DNA, 20 bp, synthetic construct
  source 1..20: mol_type = other DNA
accgccagcaggcagcggcc

SEQ ID NO: 27897 - DNA, 20 bp, synthetic construct
  source 1..20: mol_type = other DNA
ctcttggcaaaaatggcaaa

SEQ ID NO: 27898 - DNA, 20 bp, synthetic construct
  source 1..20: mol_type = other DNA
ttgacgaaacaaattttcgt

SEQ ID NO: 27899 - DNA, 20 bp, synthetic construct
  source 1..20: mol_type = other DNA
cgagacggcggcgcgtgcag

SEQ ID NO: 27900 - DNA, 20 bp, synthetic construct
  source 1..20: mol_type = other DNA
gttttgatcggcgcgtgcag

SEQ ID NO: 27901 - DNA, 20 bp, synthetic construct
  source 1..20: mol_type = other DNA
agtccaggggtggccgtgat

SEQ ID NO: 27902 - DNA, 20 bp, synthetic construct
  source 1..20: mol_type = other DNA
tccctcaagcgcagtgccca

SEQ ID NO: 27903 - DNA, 20 bp, synthetic construct
  source 1..20: mol_type = other DNA
ccgtcccagcgctaccgggc

SEQ ID NO: 27904 - DNA, 20 bp, synthetic construct
  source 1..20: mol_type = other DNA
gctggctcccggaatatgga

SEQ ID NO: 27905 - DNA, 20 bp, synthetic construct
  source 1..20: mol_type = other DNA
ttgtcaagccggaatatgga

SEQ ID NO: 27906 - DNA, 20 bp, synthetic construct
  source 1..20: mol_type = other DNA
ccgcacccttacgtatctct

SEQ ID NO: 27907 - DNA, 20 bp, synthetic construct
  source 1..20: mol_type = other DNA
tgatgtttggttcagctcgc

SEQ ID NO: 27908 - DNA, 20 bp, synthetic construct
  source 1..20: mol_type = other DNA
gtggtatctgattgttgttg

SEQ ID NO: 27909 - DNA, 20 bp, synthetic construct
  source 1..20: mol_type = other DNA
gtggtatcaaggaagctgct

SEQ ID NO: 27910 - DNA, 20 bp, synthetic construct
  source 1..20: mol_type = other DNA
tcttacaagctgcaggctct

SEQ ID NO: 27911 - DNA, 20 bp, synthetic construct
  source 1..20: mol_type = other DNA
caggctggtgactttatgaa

SEQ ID NO: 27912 - DNA, 20 bp, synthetic construct
  source 1..20: mol_type = other DNA
tggccaaccttttggctccg

SEQ ID NO: 27913 - DNA, 20 bp, synthetic construct
  source 1..20: mol_type = other DNA
gaggaggagggaaaaggcga

SEQ ID NO: 27914 - DNA, 20 bp, synthetic construct
  source 1..20: mol_type = other DNA
gaggaggacaacggctttcg

SEQ ID NO: 27915 - DNA, 20 bp, synthetic construct
  source 1..20: mol_type = other DNA
ccccgtatgggaaaaggcga

SEQ ID NO: 27916 - DNA, 20 bp, synthetic construct
  source 1..20: mol_type = other DNA
aagagtcgcgcccccgggga

SEQ ID NO: 27917 - DNA, 20 bp, synthetic construct
  source 1..20: mol_type = other DNA
tagattccagccagcccccg

SEQ ID NO: 27918 - DNA, 20 bp, synthetic construct
  source 1..20: mol_type = other DNA
gcccgcagagccagcccccg

SEQ ID NO: 27919 - DNA, 20 bp, synthetic construct
  source 1..20: mol_type = other DNA
gcccgcagcatgtcaattaa

SEQ ID NO: 27920 - DNA, 20 bp, synthetic construct
  source 1..20: mol_type = other DNA
cctggaggcgcagccccacc

SEQ ID NO: 27921 - DNA, 20 bp, synthetic construct
  source 1..20: mol_type = other DNA
gcggcaccggggcggctgcg

SEQ ID NO: 27922 - DNA, 20 bp, synthetic construct
  source 1..20: mol_type = other DNA
gccagggctgcggaggaccg

SEQ ID NO: 27923 - DNA, 20 bp, synthetic construct
  source 1..20: mol_type = other DNA
cccggggaggcgggaaatgc

SEQ ID NO: 27924 - DNA, 20 bp, synthetic construct
  source 1..20: mol_type = other DNA
cacccaacggctgccacggc

SEQ ID NO: 27925 - DNA, 20 bp, synthetic construct
  source 1..20: mol_type = other DNA
attgggcgcaactagtgtaa

SEQ ID NO: 27926 - DNA, 20 bp, synthetic construct
  source 1..20: mol_type = other DNA
ctaatcattttctctagacg

SEQ ID NO: 27927 - DNA, 20 bp, synthetic construct
  source 1..20: mol_type = other DNA
ggaggcggcgcaggcgctga

SEQ ID NO: 27928 - DNA, 20 bp, synthetic construct
  source 1..20: mol_type = other DNA
agcggccgcatgctgacatt

SEQ ID NO: 27929 - DNA, 20 bp, synthetic construct
  source 1..20: mol_type = other DNA
agcggccggggcagccttgc

SEQ ID NO: 27930 - DNA, 20 bp, synthetic construct
  source 1..20: mol_type = other DNA
tgattctaggctggtcacta

SEQ ID NO: 27931 - DNA, 20 bp, synthetic construct
  source 1..20: mol_type = other DNA
catgcttcctgctgtggctg

SEQ ID NO: 27932 - DNA, 20 bp, synthetic construct
  source 1..20: mol_type = other DNA
aggtaccccattgtatggga

SEQ ID NO: 27933 - DNA, 20 bp, synthetic construct
  source 1..20: mol_type = other DNA
cctagcgagcgagttccgcg

SEQ ID NO: 27934 - DNA, 20 bp, synthetic construct
  source 1..20: mol_type = other DNA
aagtctgaacccagcatagt

SEQ ID NO: 27935 - DNA, 20 bp, synthetic construct
  source 1..20: mol_type = other DNA
gcaaaaagcacttgtcgaca

SEQ ID NO: 27936 - DNA, 20 bp, synthetic construct
  source 1..20: mol_type = other DNA
aacaactgtgggacaacatg

SEQ ID NO: 27937 - DNA, 20 bp, synthetic construct
  source 1..20: mol_type = other DNA
gcggcccaggctgaagctca

SEQ ID NO: 27938 - DNA, 20 bp, synthetic construct
  source 1..20: mol_type = other DNA
gcggcccatctgtcgcggag

SEQ ID NO: 27939 - DNA, 20 bp, synthetic construct
  source 1..20: mol_type = other DNA
agtaagtgggctgaagctca

SEQ ID NO: 27940 - DNA, 20 bp, synthetic construct
  source 1..20: mol_type = other DNA
ctctgtgttaaaccaatcag

SEQ ID NO: 27941 - DNA, 20 bp, synthetic construct
  source 1..20: mol_type = other DNA
ttcggtaatggcctcagccc

SEQ ID NO: 27942 - DNA, 20 bp, synthetic construct
  source 1..20: mol_type = other DNA
aaccttcagagagtgcggat

SEQ ID NO: 27943 - DNA, 20 bp, synthetic construct
  source 1..20: mol_type = other DNA
ctggagcccgagagaacgaa

SEQ ID NO: 27944 - DNA, 20 bp, synthetic construct
  source 1..20: mol_type = other DNA
tccccaaatccagagggctg

SEQ ID NO: 27945 - DNA, 20 bp, synthetic construct
  source 1..20: mol_type = other DNA
atagcccaaaggacaagaaa

SEQ ID NO: 27946 - DNA, 20 bp, synthetic construct
  source 1..20: mol_type = other DNA
tgtaactgttttctgtttgg

SEQ ID NO: 27947 - DNA, 20 bp, synthetic construct
  source 1..20: mol_type = other DNA
actgcctctaagtgagcacg

SEQ ID NO: 27948 - DNA, 20 bp, synthetic construct
  source 1..20: mol_type = other DNA
gcatgtacacctgattagtt

SEQ ID NO: 27949 - DNA, 20 bp, synthetic construct
  source 1..20: mol_type = other DNA
acgtacggtccacgtcgccc

SEQ ID NO: 27950 - DNA, 20 bp, synthetic construct
  source 1..20: mol_type = other DNA
gactgttgttgtgcaattaa

SEQ ID NO: 27951 - DNA, 20 bp, synthetic construct
  source 1..20: mol_type = other DNA
atatatcgggaggaatttaa

SEQ ID NO: 27952 - DNA, 20 bp, synthetic construct
  source 1..20: mol_type = other DNA
cagggataggaggaatttaa

SEQ ID NO: 27953 - DNA, 20 bp, synthetic construct
  source 1..20: mol_type = other DNA
agtattgctgcttagttaac

SEQ ID NO: 27954 - DNA, 20 bp, synthetic construct
  source 1..20: mol_type = other DNA
atgaatcctgccgccccagc

SEQ ID NO: 27955 - DNA, 20 bp, synthetic construct
  source 1..20: mol_type = other DNA
ggggacagctttatagggga

SEQ ID NO: 27956 - DNA, 20 bp, synthetic construct
  source 1..20: mol_type = other DNA
cgtgtagcgccgcatttaaa

SEQ ID NO: 27957 - DNA, 20 bp, synthetic construct
  source 1..20: mol_type = other DNA
gagaacaagccgcatttaaa

SEQ ID NO: 27958 - DNA, 20 bp, synthetic construct
  source 1..20: mol_type = other DNA
aggtgaccacccctcgacgc

SEQ ID NO: 27959 - DNA, 20 bp, synthetic construct
  source 1..20: mol_type = other DNA
tgctcggccccgccgtcagg

SEQ ID NO: 27960 - DNA, 20 bp, synthetic construct
  source 1..20: mol_type = other DNA
tgctcggcgtgattaggttc

SEQ ID NO: 27961 - DNA, 20 bp, synthetic construct
  source 1..20: mol_type = other DNA
gccgccgctatccaggtaga

SEQ ID NO: 27962 - DNA, 20 bp, synthetic construct
  source 1..20: mol_type = other DNA
tttgctcggtcatctgctgc

SEQ ID NO: 27963 - DNA, 20 bp, synthetic construct
  source 1..20: mol_type = other DNA
ccctgactggagaaggagga

SEQ ID NO: 27964 - DNA, 20 bp, synthetic construct
  source 1..20: mol_type = other DNA
gaggaggaaagagcacctcc

SEQ ID NO: 27965 - DNA, 20 bp, synthetic construct
  source 1..20: mol_type = other DNA
gaggaggaggagaaggagga

SEQ ID NO: 27966 - DNA, 20 bp, synthetic construct
  source 1..20: mol_type = other DNA
gaattggcctgccacagaca

SEQ ID NO: 27967 - DNA, 20 bp, synthetic construct
  source 1..20: mol_type = other DNA
gaattggcgaaatgggctat

SEQ ID NO: 27968 - DNA, 20 bp, synthetic construct
  source 1..20: mol_type = other DNA
acgacaagctgccacagaca

SEQ ID NO: 27969 - DNA, 20 bp, synthetic construct
  source 1..20: mol_type = other DNA
acggtactcctgcccggcgg

SEQ ID NO: 27970 - DNA, 20 bp, synthetic construct
  source 1..20: mol_type = other DNA
gtagcccgcgcgcccctggc

SEQ ID NO: 27971 - DNA, 20 bp, synthetic construct
  source 1..20: mol_type = other DNA
tgagggacgattggcatgct

SEQ ID NO: 27972 - DNA, 20 bp, synthetic construct
  source 1..20: mol_type = other DNA
cataacctcgggtcgtaagc

SEQ ID NO: 27973 - DNA, 20 bp, synthetic construct
  source 1..20: mol_type = other DNA
cataacctgattggcatgct

SEQ ID NO: 27974 - DNA, 20 bp, synthetic construct
  source 1..20: mol_type = other DNA
tggccggagaccagggccca

SEQ ID NO: 27975 - DNA, 20 bp, synthetic construct
  source 1..20: mol_type = other DNA
ttcaaatcagttgcatatca

SEQ ID NO: 27976 - DNA, 20 bp, synthetic construct
  source 1..20: mol_type = other DNA
ttcccacaagtctcctcttc

SEQ ID NO: 27977 - DNA, 20 bp, synthetic construct
  source 1..20: mol_type = other DNA
acctttgtgtgcggtgcaac

SEQ ID NO: 27978 - DNA, 20 bp, synthetic construct
  source 1..20: mol_type = other DNA
cttgtttatttgtagtttcc

SEQ ID NO: 27979 - DNA, 20 bp, synthetic construct
  source 1..20: mol_type = other DNA
tttgaaagagcacttcccaa

SEQ ID NO: 27980 - DNA, 20 bp, synthetic construct
  source 1..20: mol_type = other DNA
agcacgtaacccaatgtgta

SEQ ID NO: 27981 - DNA, 20 bp, synthetic construct
  source 1..20: mol_type = other DNA
tgggctttagcaccagctcc

SEQ ID NO: 27982 - DNA, 20 bp, synthetic construct
  source 1..20: mol_type = other DNA
gcacacagctgtggtttatt

SEQ ID NO: 27983 - DNA, 20 bp, synthetic construct
  source 1..20: mol_type = other DNA
aaagcaggatggagctggag

SEQ ID NO: 27984 - DNA, 20 bp, synthetic construct
  source 1..20: mol_type = other DNA
gtgtatgatccgctaccagt

SEQ ID NO: 27985 - DNA, 20 bp, synthetic construct
  source 1..20: mol_type = other DNA
gcagctcggcgccacctccg

SEQ ID NO: 27986 - DNA, 20 bp, synthetic construct
  source 1..20: mol_type = other DNA
atggagaaactcctagatga

SEQ ID NO: 27987 - DNA, 20 bp, synthetic construct
  source 1..20: mol_type = other DNA
gagaaaggaaaagattagac

SEQ ID NO: 27988 - DNA, 20 bp, synthetic construct
  source 1..20: mol_type = other DNA
gagaaaggcccgcggatatg

SEQ ID NO: 27989 - DNA, 20 bp, synthetic construct
  source 1..20: mol_type = other DNA
cgcttccgaagatccgaggt

SEQ ID NO: 27990 - DNA, 20 bp, synthetic construct
  source 1..20: mol_type = other DNA
gcgcagttcccgctgtcctg

SEQ ID NO: 27991 - DNA, 20 bp, synthetic construct
  source 1..20: mol_type = other DNA
atatagctcaactgccatag

SEQ ID NO: 27992 - DNA, 20 bp, synthetic construct
  source 1..20: mol_type = other DNA
atatagctattggattggcc

SEQ ID NO: 27993 - DNA, 20 bp, synthetic construct
  source 1..20: mol_type = other DNA
ctccaggtatggtgcgcgct

SEQ ID NO: 27994 - DNA, 20 bp, synthetic construct
  source 1..20: mol_type = other DNA
attaacagtgccgccgcgcc

SEQ ID NO: 27995 - DNA, 20 bp, synthetic construct
  source 1..20: mol_type = other DNA
ggccttgtgcgctgtacttc

SEQ ID NO: 27996 - DNA, 20 bp, synthetic construct
  source 1..20: mol_type = other DNA
ttgagtatcacgcctccgga

SEQ ID NO: 27997 - DNA, 20 bp, synthetic construct
  source 1..20: mol_type = other DNA
ttgaatcaactgccagaccg

SEQ ID NO: 27998 - DNA, 20 bp, synthetic construct
  source 1..20: mol_type = other DNA
aactacatgttgtaaggctt

SEQ ID NO: 27999 - DNA, 20 bp, synthetic construct
  source 1..20: mol_type = other DNA
gtcataagtgacaagctagc

SEQ ID NO: 28000 - DNA, 20 bp, synthetic construct
  source 1..20: mol_type = other DNA
ccaggcctcactgctgagcg

SEQ ID NO: 28001 - DNA, 20 bp, synthetic construct
  source 1..20: mol_type = other DNA
ccaggccttgacaagctagc

SEQ ID NO: 28002 - DNA, 20 bp, synthetic construct
  source 1..20: mol_type = other DNA
ctggggcagggactacgaga

SEQ ID NO: 28003 - DNA, 20 bp, synthetic construct
  source 1..20: mol_type = other DNA
gaccacgtgggactacgaga

SEQ ID NO: 28004 - DNA, 20 bp, synthetic construct
  source 1..20: mol_type = other DNA
acaggctctagcttggtaga

SEQ ID NO: 28005 - DNA, 20 bp, synthetic construct
  source 1..20: mol_type = other DNA
ttctttatgtaaagacaccg

SEQ ID NO: 28006 - DNA, 20 bp, synthetic construct
  source 1..20: mol_type = other DNA
ttctttattagcttggtaga

SEQ ID NO: 28007 - DNA, 20 bp, synthetic construct
  source 1..20: mol_type = other DNA
cgcggagtcgcctcccggcc

SEQ ID NO: 28008 - DNA, 20 bp, synthetic construct
  source 1..20: mol_type = other DNA
cgcggagtgaatggagtcgg

SEQ ID NO: 28009 - DNA, 20 bp, synthetic construct
  source 1..20: mol_type = other DNA
cctcccagatttcttttaca

SEQ ID NO: 28010 - DNA, 20 bp, synthetic construct
  source 1..20: mol_type = other DNA
gagcagccgtgtggtatgat

SEQ ID NO: 28011 - DNA, 20 bp, synthetic construct
  source 1..20: mol_type = other DNA
catgtctctttgtgttcatc

SEQ ID NO: 28012 - DNA, 20 bp, synthetic construct
  source 1..20: mol_type = other DNA
tgaaagcgcgcactacacga

SEQ ID NO: 28013 - DNA, 20 bp, synthetic construct
  source 1..20: mol_type = other DNA
gtgacctcctcctcctcttt

SEQ ID NO: 28014 - DNA, 20 bp, synthetic construct
  source 1..20: mol_type = other DNA
gatccgaaaggaattggaat

SEQ ID NO: 28015 - DNA, 20 bp, synthetic construct
  source 1..20: mol_type = other DNA
ctcgtaccaggaattggaat

SEQ ID NO: 28016 - DNA, 20 bp, synthetic construct
  source 1..20: mol_type = other DNA
tatattcacaaaactgctgg

SEQ ID NO: 28017 - DNA, 20 bp, synthetic construct
  source 1..20: mol_type = other DNA
gtagtgtcgatgatctcatt

SEQ ID NO: 28018 - DNA, 20 bp, synthetic construct
  source 1..20: mol_type = other DNA
atttgtcgacaacatcttac

SEQ ID NO: 28019 - DNA, 20 bp, synthetic construct
  source 1..20: mol_type = other DNA
gggcgcccagaaggagcagg

SEQ ID NO: 28020 - DNA, 20 bp, synthetic construct
  source 1..20: mol_type = other DNA
acagctatagaaggagcagg

SEQ ID NO: 28021 - DNA, 20 bp, synthetic construct
  source 1..20: mol_type = other DNA
ctactggacagaccggaatg

SEQ ID NO: 28022 - DNA, 20 bp, synthetic construct
  source 1..20: mol_type = other DNA
ggggtgtagaggaaggaagg

SEQ ID NO: 28023 - DNA, 20 bp, synthetic construct
  source 1..20: mol_type = other DNA
tcaggtagattgttatctat

SEQ ID NO: 28024 - DNA, 20 bp, synthetic construct
  source 1..20: mol_type = other DNA
gaagcctggacccacacgcg

SEQ ID NO: 28025 - DNA, 20 bp, synthetic construct
  source 1..20: mol_type = other DNA
ctcattgccgttaaacatca

SEQ ID NO: 28026 - DNA, 20 bp, synthetic construct
  source 1..20: mol_type = other DNA
tgttaatgaaacaagccaga

SEQ ID NO: 28027 - DNA, 20 bp, synthetic construct
  source 1..20: mol_type = other DNA
cgaagcacccagataagagc

SEQ ID NO: 28028 - DNA, 20 bp, synthetic construct
  source 1..20: mol_type = other DNA
cgaagcacgactgctcccag

SEQ ID NO: 28029 - DNA, 20 bp, synthetic construct
  source 1..20: mol_type = other DNA
gcgggctgctcgcgccggct

SEQ ID NO: 28030 - DNA, 20 bp, synthetic construct
  source 1..20: mol_type = other DNA
ctttgtggtttttgtaattt

SEQ ID NO: 28031 - DNA, 20 bp, synthetic construct
  source 1..20: mol_type = other DNA
tttccgcacgcctcgaggcg

SEQ ID NO: 28032 - DNA, 20 bp, synthetic construct
  source 1..20: mol_type = other DNA
agtgtaagaaacagtaagcc

SEQ ID NO: 28033 - DNA, 20 bp, synthetic construct
  source 1..20: mol_type = other DNA
ccctcgagattacataggtc

SEQ ID NO: 28034 - DNA, 20 bp, synthetic construct
  source 1..20: mol_type = other DNA
agtagcaggccagagtctga

SEQ ID NO: 28035 - DNA, 20 bp, synthetic construct
  source 1..20: mol_type = other DNA
ccaggtgacagcggcatgga

SEQ ID NO: 28036 - DNA, 20 bp, synthetic construct
  source 1..20: mol_type = other DNA
ccaggtgatcagcagcgcac

SEQ ID NO: 28037 - DNA, 20 bp, synthetic construct
  source 1..20: mol_type = other DNA
ggccagaccagcggcatgga

SEQ ID NO: 28038 - DNA, 20 bp, synthetic construct
  source 1..20: mol_type = other DNA
caatataacaaaaaaacatg

SEQ ID NO: 28039 - DNA, 20 bp, synthetic construct
  source 1..20: mol_type = other DNA
aggcagcggaaccccccacc

SEQ ID NO: 28040 - DNA, 20 bp, synthetic construct
  source 1..20: mol_type = other DNA
ccaaccacgaaccccccacc

SEQ ID NO: 28041 - DNA, 20 bp, synthetic construct
  source 1..20: mol_type = other DNA
ttttcaacattaatactatt

SEQ ID NO: 28042 - DNA, 20 bp, synthetic construct
  source 1..20: mol_type = other DNA
acacggctattaatactatt

SEQ ID NO: 28043 - DNA, 20 bp, synthetic construct
  source 1..20: mol_type = other DNA
tgctgccgaggtaactctct

SEQ ID NO: 28044 - DNA, 20 bp, synthetic construct
  source 1..20: mol_type = other DNA
cacaggagttgtaaggcagc

SEQ ID NO: 28045 - DNA, 20 bp, synthetic construct
  source 1..20: mol_type = other DNA
cagtggatcaaatcctcatg

SEQ ID NO: 28046 - DNA, 20 bp, synthetic construct
  source 1..20: mol_type = other DNA
gttgtttcacctcagcatcc

SEQ ID NO: 28047 - DNA, 20 bp, synthetic construct
  source 1..20: mol_type = other DNA
cttacagagactggaaaaga

SEQ ID NO: 28048 - DNA, 20 bp, synthetic construct
  source 1..20: mol_type = other DNA
gtagtcctccggcccctgaa

SEQ ID NO: 28049 - DNA, 20 bp, synthetic construct
  source 1..20: mol_type = other DNA
gtagtcctggattgaagatc

SEQ ID NO: 28050 - DNA, 20 bp, synthetic construct
  source 1..20: mol_type = other DNA
cccagcctgaggaaggaagg

SEQ ID NO: 28051 - DNA, 20 bp, synthetic construct
  source 1..20: mol_type = other DNA
ttgagtatggatatcatatt

SEQ ID NO: 28052 - DNA, 20 bp, synthetic construct
  source 1..20: mol_type = other DNA
gcctactgcacgcctccgga

SEQ ID NO: 28053 - DNA, 20 bp, synthetic construct
  source 1..20: mol_type = other DNA
tcaagctcaaatgcactgga

SEQ ID NO: 28054 - DNA, 20 bp, synthetic construct
  source 1..20: mol_type = other DNA
tgagcgatttgtgcaattaa

SEQ ID NO: 28055 - DNA, 20 bp, synthetic construct
  source 1..20: mol_type = other DNA
ctgtaggaaagttaaaacca

SEQ ID NO: 28056 - DNA, 20 bp, synthetic construct
  source 1..20: mol_type = other DNA
aatagtgtctggagccggtc

SEQ ID NO: 28057 - DNA, 20 bp, synthetic construct
  source 1..20: mol_type = other DNA
agtcgaaagtattgctatag

SEQ ID NO: 28058 - DNA, 20 bp, synthetic construct
  source 1..20: mol_type = other DNA
ctctcgccgccgcccgagcg

SEQ ID NO: 28059 - DNA, 20 bp, synthetic construct
  source 1..20: mol_type = other DNA
aaaggcagaagccttcaggt

SEQ ID NO: 28060 - DNA, 20 bp, synthetic construct
  source 1..20: mol_type = other DNA
gcgactgtcaaacgttggac

SEQ ID NO: 28061 - DNA, 20 bp, synthetic construct
  source 1..20: mol_type = other DNA
atgaattagaaagaatcagg

SEQ ID NO: 28062 - DNA, 20 bp, synthetic construct
  source 1..20: mol_type = other DNA
tcacgcacgaaagaatcagg

SEQ ID NO: 28063 - DNA, 20 bp, synthetic construct
  source 1..20: mol_type = other DNA
gcaaaaagattacgtaggtc

SEQ ID NO: 28064 - DNA, 20 bp, synthetic construct
  source 1..20: mol_type = other DNA
ttgccgctattacgtaggtc

SEQ ID NO: 28065 - DNA, 20 bp, synthetic construct
  source 1..20: mol_type = other DNA
ggccccgcggagccaggttg

SEQ ID NO: 28066 - DNA, 20 bp, synthetic construct
  source 1..20: mol_type = other DNA
ccagaaggcagtgaaattcc

SEQ ID NO: 28067 - DNA, 20 bp, synthetic construct
  source 1..20: mol_type = other DNA
aaaaagacgagtatttactt

SEQ ID NO: 28068 - DNA, 20 bp, synthetic construct
  source 1..20: mol_type = other DNA
gttatgcatccacgtcgccc

SEQ ID NO: 28069 - DNA, 20 bp, synthetic construct
  source 1..20: mol_type = other DNA
tcctgttgatccgcatggtg

SEQ ID NO: 28070 - DNA, 20 bp, synthetic construct
  source 1..20: mol_type = other DNA
tcctgttgccgtttccctcc

SEQ ID NO: 28071 - DNA, 20 bp, synthetic construct
  source 1..20: mol_type = other DNA
cgagcagcttccagtcgtgt

SEQ ID NO: 28072 - DNA, 20 bp, synthetic construct
  source 1..20: mol_type = other DNA
tggccggattaacttcaaag

SEQ ID NO: 28073 - DNA, 20 bp, synthetic construct
  source 1..20: mol_type = other DNA
aaaacgcgatccaacgccga

SEQ ID NO: 28074 - DNA, 20 bp, synthetic construct
  source 1..20: mol_type = other DNA
ccacggaggcccaaggcgaa

SEQ ID NO: 28075 - DNA, 20 bp, synthetic construct
  source 1..20: mol_type = other DNA
gctgccgcccgagcccgggt

SEQ ID NO: 28076 - DNA, 20 bp, synthetic construct
  source 1..20: mol_type = other DNA
agactgttccgagcccgggt

SEQ ID NO: 28077 - DNA, 20 bp, synthetic construct
  source 1..20: mol_type = other DNA
ggctgggagagaccacccgc

SEQ ID NO: 28078 - DNA, 20 bp, synthetic construct
  source 1..20: mol_type = other DNA
ggctgggattttattgtgct

SEQ ID NO: 28079 - DNA, 20 bp, synthetic construct
  source 1..20: mol_type = other DNA
aatacatagggcgggagctg

SEQ ID NO: 28080 - DNA, 20 bp, synthetic construct
  source 1..20: mol_type = other DNA
cctagtccctgcactaggtt

SEQ ID NO: 28081 - DNA, 20 bp, synthetic construct
  source 1..20: mol_type = other DNA
ccggtgagttgcactaggtt

SEQ ID NO: 28082 - DNA, 20 bp, synthetic construct
  source 1..20: mol_type = other DNA
cctagtcctgcgtacgatac

SEQ ID NO: 28083 - DNA, 20 bp, synthetic construct
  source 1..20: mol_type = other DNA
aagctgtgctgcactaggtt

SEQ ID NO: 28084 - DNA, 20 bp, synthetic construct
  source 1..20: mol_type = other DNA
atggcttaagccctgagtac

SEQ ID NO: 28085 - DNA, 20 bp, synthetic construct
  source 1..20: mol_type = other DNA
agaacctgggttcgcgacgc

SEQ ID NO: 28086 - DNA, 20 bp, synthetic construct
  source 1..20: mol_type = other DNA
cctcggctggttcgcgacgc

SEQ ID NO: 28087 - DNA, 20 bp, synthetic construct
  source 1..20: mol_type = other DNA
aggcgcacaacgtttttcga

SEQ ID NO: 28088 - DNA, 20 bp, synthetic construct
  source 1..20: mol_type = other DNA
aaatccagtaaagaaagtgt

SEQ ID NO: 28089 - DNA, 20 bp, synthetic construct
  source 1..20: mol_type = other DNA
tgccaggtgtgaagtggagt

SEQ ID NO: 28090 - DNA, 20 bp, synthetic construct
  source 1..20: mol_type = other DNA
aatgtacagtgaagtggagt

SEQ ID NO: 28091 - DNA, 20 bp, synthetic construct
  source 1..20: mol_type = other DNA
cggcgccgagtaaataagat

SEQ ID NO: 28092 - DNA, 20 bp, synthetic construct
  source 1..20: mol_type = other DNA
cggcgccggcccccgccttc

SEQ ID NO: 28093 - DNA, 20 bp, synthetic construct
  source 1..20: mol_type = other DNA
acgacgccactatggttgat

SEQ ID NO: 28094 - DNA, 20 bp, synthetic construct
  source 1..20: mol_type = other DNA
caagtttctggtctttaaaa

SEQ ID NO: 28095 - DNA, 20 bp, synthetic construct
  source 1..20: mol_type = other DNA
tcgccgaatggtctttaaaa

SEQ ID NO: 28096 - DNA, 20 bp, synthetic construct
  source 1..20: mol_type = other DNA
cactgcccggcggactgaat

SEQ ID NO: 28097 - DNA, 20 bp, synthetic construct
  source 1..20: mol_type = other DNA
aattgattagttagatggaa

SEQ ID NO: 28098 - DNA, 20 bp, synthetic construct
  source 1..20: mol_type = other DNA
aggagacccatcgtggtata

SEQ ID NO: 28099 - DNA, 20 bp, synthetic construct
  source 1..20: mol_type = other DNA
tctgatgaagcagaaaagaa

SEQ ID NO: 28100 - DNA, 20 bp, synthetic construct
  source 1..20: mol_type = other DNA
ccgtccccgactccttcctc

SEQ ID NO: 28101 - DNA, 20 bp, synthetic construct
  source 1..20: mol_type = other DNA
aaacggtggactccttcctc

SEQ ID NO: 28102 - DNA, 20 bp, synthetic construct
  source 1..20: mol_type = other DNA
tttctttcgcagtcgtggct

SEQ ID NO: 28103 - DNA, 20 bp, synthetic construct
  source 1..20: mol_type = other DNA
ccatcagattcatcatcaac

SEQ ID NO: 28104 - DNA, 20 bp, synthetic construct
  source 1..20: mol_type = other DNA
ccatcagacgacgacgatga

SEQ ID NO: 28105 - DNA, 20 bp, synthetic construct
  source 1..20: mol_type = other DNA
tgtggcagaactcaaatgga

SEQ ID NO: 28106 - DNA, 20 bp, synthetic construct
  source 1..20: mol_type = other DNA
ataaagacctcaccggcggt

SEQ ID NO: 28107 - DNA, 20 bp, synthetic construct
  source 1..20: mol_type = other DNA
gggcctcgctcaattctaac

SEQ ID NO: 28108 - DNA, 20 bp, synthetic construct
  source 1..20: mol_type = other DNA
aatcatacaacatccacacg

SEQ ID NO: 28109 - DNA, 20 bp, synthetic construct
  source 1..20: mol_type = other DNA
gtgtaccataataaaataca

SEQ ID NO: 28110 - DNA, 20 bp, synthetic construct
  source 1..20: mol_type = other DNA
cccgtttttaataaaataca

SEQ ID NO: 28111 - DNA, 20 bp, synthetic construct
  source 1..20: mol_type = other DNA
tggagacaacatgtgggaac

SEQ ID NO: 28112 - DNA, 20 bp, synthetic construct
  source 1..20: mol_type = other DNA
actctcgtacatgtggttct

SEQ ID NO: 28113 - DNA, 20 bp, synthetic construct
  source 1..20: mol_type = other DNA
tggagacaacatgtggcaaa

SEQ ID NO: 28114 - DNA, 20 bp, synthetic construct
  source 1..20: mol_type = other DNA
tggagacacggctccccggg

SEQ ID NO: 28115 - DNA, 20 bp, synthetic construct
  source 1..20: mol_type = other DNA
tggagacatgtccacaaggc

SEQ ID NO: 28116 - DNA, 20 bp, synthetic construct
  source 1..20: mol_type = other DNA
aactatggacatgtggttct

SEQ ID NO: 28117 - DNA, 20 bp, synthetic construct
  source 1..20: mol_type = other DNA
tctaaggacgtggtttttca

SEQ ID NO: 28118 - DNA, 20 bp, synthetic construct
  source 1..20: mol_type = other DNA
tctaaggagccctccaaagt

SEQ ID NO: 28119 - DNA, 20 bp, synthetic construct
  source 1..20: mol_type = other DNA
acgaggcgagccttcttcgc

SEQ ID NO: 28120 - DNA, 20 bp, synthetic construct
  source 1..20: mol_type = other DNA
acgaggcggctgacggggcg

SEQ ID NO: 28121 - DNA, 20 bp, synthetic construct
  source 1..20: mol_type = other DNA
tacctaatgctgacggggcg

SEQ ID NO: 28122 - DNA, 20 bp, synthetic construct
  source 1..20: mol_type = other DNA
gtcaggcgtgcctggagatt

SEQ ID NO: 28123 - DNA, 20 bp, synthetic construct
  source 1..20: mol_type = other DNA
ctctcttgaccaataggcgt

SEQ ID NO: 28124 - DNA, 20 bp, synthetic construct
  source 1..20: mol_type = other DNA
aacgcccatgctcccagggg

SEQ ID NO: 28125 - DNA, 20 bp, synthetic construct
  source 1..20: mol_type = other DNA
ctgttgacgagagggttttc

SEQ ID NO: 28126 - DNA, 20 bp, synthetic construct
  source 1..20: mol_type = other DNA
ctgttgactgctcccagggg

SEQ ID NO: 28127 - DNA, 20 bp, synthetic construct
  source 1..20: mol_type = other DNA
ccagccccgaggctcagaag

SEQ ID NO: 28128 - DNA, 20 bp, synthetic construct
  source 1..20: mol_type = other DNA
cagcatgtcggtgcatggtg

SEQ ID NO: 28129 - DNA, 20 bp, synthetic construct
  source 1..20: mol_type = other DNA
tttacccgcggtgcatggtg

SEQ ID NO: 28130 - DNA, 20 bp, synthetic construct
  source 1..20: mol_type = other DNA
tcgacgcaactttctcgtcg

SEQ ID NO: 28131 - DNA, 20 bp, synthetic construct
  source 1..20: mol_type = other DNA
ggctgcggactttctcgtcg

SEQ ID NO: 28132 - DNA, 20 bp, synthetic construct
  source 1..20: mol_type = other DNA
ggctgcggcgaccgctaggc

SEQ ID NO: 28133 - DNA, 20 bp, synthetic construct
  source 1..20: mol_type = other DNA
ggcggcggggctcgcgcggg

SEQ ID NO: 28134 - DNA, 20 bp, synthetic construct
  source 1..20: mol_type = other DNA
aaacctttggctcgcgcggg

SEQ ID NO: 28135 - DNA, 20 bp, synthetic construct
  source 1..20: mol_type = other DNA
cgcccgcctgccctgccgct

SEQ ID NO: 28136 - DNA, 20 bp, synthetic construct
  source 1..20: mol_type = other DNA
tcgtgtggtgccctgccgct

SEQ ID NO: 28137 - DNA, 20 bp, synthetic construct
  source 1..20: mol_type = other DNA
tgagtcagtctgaggaaatg

SEQ ID NO: 28138 - DNA, 20 bp, synthetic construct
  source 1..20: mol_type = other DNA
gccaccgcggggcccgggtg

SEQ ID NO: 28139 - DNA, 20 bp, synthetic construct
  source 1..20: mol_type = other DNA
cgctcccgacatgccccgcc

SEQ ID NO: 28140 - DNA, 20 bp, synthetic construct
  source 1..20: mol_type = other DNA
cgctcccgacatgccccgcg

SEQ ID NO: 28141 - DNA, 20 bp, synthetic construct
  source 1..20: mol_type = other DNA
aagatttcacatgccccgcc

SEQ ID NO: 28142 - DNA, 20 bp, synthetic construct
  source 1..20: mol_type = other DNA
gtagatgccgcgcgccctcc

SEQ ID NO: 28143 - DNA, 20 bp, synthetic construct
  source 1..20: mol_type = other DNA
accccgctaatctattactg

SEQ ID NO: 28144 - DNA, 20 bp, synthetic construct
  source 1..20: mol_type = other DNA
aaagcaggtacttatgcact

SEQ ID NO: 28145 - DNA, 20 bp, synthetic construct
  source 1..20: mol_type = other DNA
tttattatatggagctggag

SEQ ID NO: 28146 - DNA, 20 bp, synthetic construct
  source 1..20: mol_type = other DNA
ccctcgccgcggtcccatgg

SEQ ID NO: 28147 - DNA, 20 bp, synthetic construct
  source 1..20: mol_type = other DNA
ttggggtgagcgaatgacaa

SEQ ID NO: 28148 - DNA, 20 bp, synthetic construct
  source 1..20: mol_type = other DNA
cgggcgcgaatgtagactta

SEQ ID NO: 28149 - DNA, 20 bp, synthetic construct
  source 1..20: mol_type = other DNA
cgggcgcgggccggcgggcg

SEQ ID NO: 28150 - DNA, 20 bp, synthetic construct
  source 1..20: mol_type = other DNA
taggcaattgcccggccatt

SEQ ID NO: 28151 - DNA, 20 bp, synthetic construct
  source 1..20: mol_type = other DNA
ccgctcaatgcccggaaatt

SEQ ID NO: 28152 - DNA, 20 bp, synthetic construct
  source 1..20: mol_type = other DNA
ccgctcaaactgaatgcccc

SEQ ID NO: 28153 - DNA, 20 bp, synthetic construct
  source 1..20: mol_type = other DNA
ccgctcaatgcccggagatt

SEQ ID NO: 28154 - DNA, 20 bp, synthetic construct
  source 1..20: mol_type = other DNA
ataggggttgcccggaaatt

SEQ ID NO: 28155 - DNA, 20 bp, synthetic construct
  source 1..20: mol_type = other DNA
cgaggcttcgtcctgcgccg

SEQ ID NO: 28156 - DNA, 20 bp, synthetic construct
  source 1..20: mol_type = other DNA
ctcactcgcacaagtggacc

SEQ ID NO: 28157 - DNA, 20 bp, synthetic construct
  source 1..20: mol_type = other DNA
aattagatcacaagtggacc

SEQ ID NO: 28158 - DNA, 20 bp, synthetic construct
  source 1..20: mol_type = other DNA
agggacacgcagtgacgagc

SEQ ID NO: 28159 - DNA, 20 bp, synthetic construct
  source 1..20: mol_type = other DNA
tgacaggacgtctggacccg

SEQ ID NO: 28160 - DNA, 20 bp, synthetic construct
  source 1..20: mol_type = other DNA
cgaataattgccgccccagc

SEQ ID NO: 28161 - DNA, 20 bp, synthetic construct
  source 1..20: mol_type = other DNA
ctctcgcagctgccacccga

SEQ ID NO: 28162 - DNA, 20 bp, synthetic construct
  source 1..20: mol_type = other DNA
ctctcgcacgacaattgtcc

SEQ ID NO: 28163 - DNA, 20 bp, synthetic construct
  source 1..20: mol_type = other DNA
gagtcatcgacccaaaaggt

SEQ ID NO: 28164 - DNA, 20 bp, synthetic construct
  source 1..20: mol_type = other DNA
cgacgttggtcgaagttcgt

SEQ ID NO: 28165 - DNA, 20 bp, synthetic construct
  source 1..20: mol_type = other DNA
gcagaggcctgagcgcctga

SEQ ID NO: 28166 - DNA, 20 bp, synthetic construct
  source 1..20: mol_type = other DNA
tcgcgaggcaaatcatcctg

SEQ ID NO: 28167 - DNA, 20 bp, synthetic construct
  source 1..20: mol_type = other DNA
tcgcgagggtttgggaggat

SEQ ID NO: 28168 - DNA, 20 bp, synthetic construct
  source 1..20: mol_type = other DNA
actgcgcggaggcacagagg

SEQ ID NO: 28169 - DNA, 20 bp, synthetic construct
  source 1..20: mol_type = other DNA
gcgccgcgcgaagtcccaat

SEQ ID NO: 28170 - DNA, 20 bp, synthetic construct
  source 1..20: mol_type = other DNA
attggtttgctcagggagga

SEQ ID NO: 28171 - DNA, 20 bp, synthetic construct
  source 1..20: mol_type = other DNA
agtcccagtggcggaggcta

SEQ ID NO: 28172 - DNA, 20 bp, synthetic construct
  source 1..20: mol_type = other DNA
gaaatctcctggagggccgg

SEQ ID NO: 28173 - DNA, 20 bp, synthetic construct
  source 1..20: mol_type = other DNA
tgtcagagacctgtaatgct

SEQ ID NO: 28174 - DNA, 20 bp, synthetic construct
  source 1..20: mol_type = other DNA
tgtcagagctggagggccgg

SEQ ID NO: 28175 - DNA, 20 bp, synthetic construct
  source 1..20: mol_type = other DNA
agcagcagcaaccactagcc

SEQ ID NO: 28176 - DNA, 20 bp, synthetic construct
  source 1..20: mol_type = other DNA
gaagggggcggagaggaagg

SEQ ID NO: 28177 - DNA, 20 bp, synthetic construct
  source 1..20: mol_type = other DNA
cagtaatagacgccgaggcg

SEQ ID NO: 28178 - DNA, 20 bp, synthetic construct
  source 1..20: mol_type = other DNA
agcatgatcggcgcccgagg

SEQ ID NO: 28179 - DNA, 20 bp, synthetic construct
  source 1..20: mol_type = other DNA
ggcagagagcacggagccgg

SEQ ID NO: 28180 - DNA, 20 bp, synthetic construct
  source 1..20: mol_type = other DNA
agacgccgcgctcagcttcc

SEQ ID NO: 28181 - DNA, 20 bp, synthetic construct
  source 1..20: mol_type = other DNA
gcgctctgtgtggccgaggc

SEQ ID NO: 28182 - DNA, 20 bp, synthetic construct
  source 1..20: mol_type = other DNA
ggcggcggcgggtgagctca

SEQ ID NO: 28183 - DNA, 20 bp, synthetic construct
  source 1..20: mol_type = other DNA
aaggtaccaggaaccgaatt

SEQ ID NO: 28184 - DNA, 20 bp, synthetic construct
  source 1..20: mol_type = other DNA
tctcagcaaagagcctggaa

SEQ ID NO: 28185 - DNA, 20 bp, synthetic construct
  source 1..20: mol_type = other DNA
tggtgggattctcagattgg

SEQ ID NO: 28186 - DNA, 20 bp, synthetic construct
  source 1..20: mol_type = other DNA
atggagaaggcgtggacgac

SEQ ID NO: 28187 - DNA, 20 bp, synthetic construct
  source 1..20: mol_type = other DNA
gcctccttactcctagatga

SEQ ID NO: 28188 - DNA, 20 bp, synthetic construct
  source 1..20: mol_type = other DNA
caaggagggacgtgttggct

SEQ ID NO: 28189 - DNA, 20 bp, synthetic construct
  source 1..20: mol_type = other DNA
agtcatcatgtacagccctg

SEQ ID NO: 28190 - DNA, 20 bp, synthetic construct
  source 1..20: mol_type = other DNA
cgaccgggagcggctgggtt

SEQ ID NO: 28191 - DNA, 20 bp, synthetic construct
  source 1..20: mol_type = other DNA
gtagccggtccttggcaaga

SEQ ID NO: 28192 - DNA, 20 bp, synthetic construct
  source 1..20: mol_type = other DNA
tccaagtcggacaccaggaa

SEQ ID NO: 28193 - DNA, 20 bp, synthetic construct
  source 1..20: mol_type = other DNA
gccctctcgctttccctctc

SEQ ID NO: 28194 - DNA, 20 bp, synthetic construct
  source 1..20: mol_type = other DNA
ggctgcagggccgctaggcc

SEQ ID NO: 28195 - DNA, 20 bp, synthetic construct
  source 1..20: mol_type = other DNA
gaaaagagtaagagtactga

SEQ ID NO: 28196 - DNA, 20 bp, synthetic construct
  source 1..20: mol_type = other DNA
ccgcttacccggcagggcgt

SEQ ID NO: 28197 - DNA, 20 bp, synthetic construct
  source 1..20: mol_type = other DNA
gcagtgggccgcctcgatcc

SEQ ID NO: 28198 - DNA, 20 bp, synthetic construct
  source 1..20: mol_type = other DNA
gcagtggggactaaacggtt

SEQ ID NO: 28199 - DNA, 20 bp, synthetic construct
  source 1..20: mol_type = other DNA
ccgctcaatacccagaaatt

SEQ ID NO: 28200 - DNA, 20 bp, synthetic construct
  source 1..20: mol_type = other DNA
gtcagtgttacccagaaatt

SEQ ID NO: 28201 - DNA, 20 bp, synthetic construct
  source 1..20: mol_type = other DNA
cagacgcggcgtggctgtga

SEQ ID NO: 28202 - DNA, 20 bp, synthetic construct
  source 1..20: mol_type = other DNA
tccatgctggaggctgggtg

SEQ ID NO: 28203 - DNA, 20 bp, synthetic construct
  source 1..20: mol_type = other DNA
accaaggaaggcagcggcag

SEQ ID NO: 28204 - DNA, 20 bp, synthetic construct
  source 1..20: mol_type = other DNA
gctggacacaccgcctccga

SEQ ID NO: 28205 - DNA, 20 bp, synthetic construct
  source 1..20: mol_type = other DNA
tggccgtgcaccgcctccga

SEQ ID NO: 28206 - DNA, 20 bp, synthetic construct
  source 1..20: mol_type = other DNA
tccttggcctgacccagaat

SEQ ID NO: 28207 - DNA, 20 bp, synthetic construct
  source 1..20: mol_type = other DNA
agtcaaaacgctccgtaacc

SEQ ID NO: 28208 - DNA, 20 bp, synthetic construct
  source 1..20: mol_type = other DNA
agtcaaaagagggttgtcaa

SEQ ID NO: 28209 - DNA, 20 bp, synthetic construct
  source 1..20: mol_type = other DNA
tgcgttggcggcctacctat

SEQ ID NO: 28210 - DNA, 20 bp, synthetic construct
  source 1..20: mol_type = other DNA
cagccctcgcctccctgccc

SEQ ID NO: 28211 - DNA, 20 bp, synthetic construct
  source 1..20: mol_type = other DNA
gcaccatgctaacttcgaac

SEQ ID NO: 28212 - DNA, 20 bp, synthetic construct
  source 1..20: mol_type = other DNA
agtttcaatcttacagttgt

SEQ ID NO: 28213 - DNA, 20 bp, synthetic construct
  source 1..20: mol_type = other DNA
aaagcggcttttggttcggc

SEQ ID NO: 28214 - DNA, 20 bp, synthetic construct
  source 1..20: mol_type = other DNA
gtgcacatttttggttcggc

SEQ ID NO: 28215 - DNA, 20 bp, synthetic construct
  source 1..20: mol_type = other DNA
cgtatgttcagatcaaaagt

SEQ ID NO: 28216 - DNA, 20 bp, synthetic construct
  source 1..20: mol_type = other DNA
atagaagccagatcaaaagt

SEQ ID NO: 28217 - DNA, 20 bp, synthetic construct
  source 1..20: mol_type = other DNA
gtgagccctgtttttgccac

SEQ ID NO: 28218 - DNA, 20 bp, synthetic construct
  source 1..20: mol_type = other DNA
gtgagcccgcaaaggattgg

SEQ ID NO: 28219 - DNA, 20 bp, synthetic construct
  source 1..20: mol_type = other DNA
cagcaagtcttttccacaat

SEQ ID NO: 28220 - DNA, 20 bp, synthetic construct
  source 1..20: mol_type = other DNA
tttacgaccttttccacaat

SEQ ID NO: 28221 - DNA, 20 bp, synthetic construct
  source 1..20: mol_type = other DNA
ctaaaatcgcgctgtacttc

SEQ ID NO: 28222 - DNA, 20 bp, synthetic construct
  source 1..20: mol_type = other DNA
attatgggctattctagatc

SEQ ID NO: 28223 - DNA, 20 bp, synthetic construct
  source 1..20: mol_type = other DNA
tgtctttataacgtcgcatc

SEQ ID NO: 28224 - DNA, 20 bp, synthetic construct
  source 1..20: mol_type = other DNA
tgtggtgaaggcgtgtaaaa

SEQ ID NO: 28225 - DNA, 20 bp, synthetic construct
  source 1..20: mol_type = other DNA
aagtctttgttttgaaagat

SEQ ID NO: 28226 - DNA, 20 bp, synthetic construct
  source 1..20: mol_type = other DNA
tgtcatttcctacctgttcg

SEQ ID NO: 28227 - DNA, 20 bp, synthetic construct
  source 1..20: mol_type = other DNA
tatgaaacttatggggatac

SEQ ID NO: 28228 - DNA, 20 bp, synthetic construct
  source 1..20: mol_type = other DNA
tagccataagagagtgggga

SEQ ID NO: 28229 - DNA, 20 bp, synthetic construct
  source 1..20: mol_type = other DNA
tggtttaaggacctcacgga

SEQ ID NO: 28230 - DNA, 20 bp, synthetic construct
  source 1..20: mol_type = other DNA
agataaataatccagtccct

SEQ ID NO: 28231 - DNA, 20 bp, synthetic construct
  source 1..20: mol_type = other DNA
tctggggaaatccagtccct

SEQ ID NO: 28232 - DNA, 20 bp, synthetic construct
  source 1..20: mol_type = other DNA
gggggcgccgcaggcgcgag

SEQ ID NO: 28233 - DNA, 20 bp, synthetic construct
  source 1..20: mol_type = other DNA
gtcacgtgccgaaaatccct

SEQ ID NO: 28234 - DNA, 20 bp, synthetic construct
  source 1..20: mol_type = other DNA
tgttgggaatcttcagccag

SEQ ID NO: 28235 - DNA, 20 bp, synthetic construct
  source 1..20: mol_type = other DNA
ctcgaagcaatgtatggccc

SEQ ID NO: 28236 - DNA, 20 bp, synthetic construct
  source 1..20: mol_type = other DNA
agactcaagggtctgtcgga

SEQ ID NO: 28237 - DNA, 20 bp, synthetic construct
  source 1..20: mol_type = other DNA
ggcaggcgtcatctacttct

SEQ ID NO: 28238 - DNA, 20 bp, synthetic construct
  source 1..20: mol_type = other DNA
attgcatacgggagcagcac

SEQ ID NO: 28239 - DNA, 20 bp, synthetic construct
  source 1..20: mol_type = other DNA
ctactgcttccctcgttcga

SEQ ID NO: 28240 - DNA, 20 bp, synthetic construct
  source 1..20: mol_type = other DNA
tcttcctcggggtagggatg

SEQ ID NO: 28241 - DNA, 20 bp, synthetic construct
  source 1..20: mol_type = other DNA
gatcgtcactaaattcagcc

SEQ ID NO: 28242 - DNA, 20 bp, synthetic construct
  source 1..20: mol_type = other DNA
gatcgtcttagtatgagaat

SEQ ID NO: 28243 - DNA, 20 bp, synthetic construct
  source 1..20: mol_type = other DNA
ttcgcggagctccctcagcc

SEQ ID NO: 28244 - DNA, 20 bp, synthetic construct
  source 1..20: mol_type = other DNA
gcgtctcgcctgcgcgggct

SEQ ID NO: 28245 - DNA, 20 bp, synthetic construct
  source 1..20: mol_type = other DNA
ctattgagctaggagggcca

SEQ ID NO: 28246 - DNA, 20 bp, synthetic construct
  source 1..20: mol_type = other DNA
gctgctccctaggagggcca

SEQ ID NO: 28247 - DNA, 20 bp, synthetic construct
  source 1..20: mol_type = other DNA
cgcggggagccaggcctcgg

SEQ ID NO: 28248 - DNA, 20 bp, synthetic construct
  source 1..20: mol_type = other DNA
aattataggccaggcctcgg

SEQ ID NO: 28249 - DNA, 20 bp, synthetic construct
  source 1..20: mol_type = other DNA
cgcggggacgggtcgtagat

SEQ ID NO: 28250 - DNA, 20 bp, synthetic construct
  source 1..20: mol_type = other DNA
ttgttaccatatagctattg

SEQ ID NO: 28251 - DNA, 20 bp, synthetic construct
  source 1..20: mol_type = other DNA
gcgccgtcggtgagtcagtc

SEQ ID NO: 28252 - DNA, 20 bp, synthetic construct
  source 1..20: mol_type = other DNA
aatccttacgcggcgcattt

SEQ ID NO: 28253 - DNA, 20 bp, synthetic construct
  source 1..20: mol_type = other DNA
cgccagcttgggaaaaggcc

SEQ ID NO: 28254 - DNA, 20 bp, synthetic construct
  source 1..20: mol_type = other DNA
tgccagcttgggaaaaggcc

SEQ ID NO: 28255 - DNA, 20 bp, synthetic construct
  source 1..20: mol_type = other DNA
tgcccactaacttaacttat

SEQ ID NO: 28256 - DNA, 20 bp, synthetic construct
  source 1..20: mol_type = other DNA
tgcccactgctcagtggagc

SEQ ID NO: 28257 - DNA, 20 bp, synthetic construct
  source 1..20: mol_type = other DNA
gggactgcaattattaacat

SEQ ID NO: 28258 - DNA, 20 bp, synthetic construct
  source 1..20: mol_type = other DNA
gggactgctcggccgcctcc

SEQ ID NO: 28259 - DNA, 20 bp, synthetic construct
  source 1..20: mol_type = other DNA
ggcactcgaggtgtgagcgg

SEQ ID NO: 28260 - DNA, 20 bp, synthetic construct
  source 1..20: mol_type = other DNA
cagctagcccaaacagcgac

SEQ ID NO: 28261 - DNA, 20 bp, synthetic construct
  source 1..20: mol_type = other DNA
caggacgctcaacccaccgt

SEQ ID NO: 28262 - DNA, 20 bp, synthetic construct
  source 1..20: mol_type = other DNA
ggttcccggggagggggcgt

SEQ ID NO: 28263 - DNA, 20 bp, synthetic construct
  source 1..20: mol_type = other DNA
ggttcccgttcgttcaatag

SEQ ID NO: 28264 - DNA, 20 bp, synthetic construct
  source 1..20: mol_type = other DNA
ccgaggacgggagggggcgt

SEQ ID NO: 28265 - DNA, 20 bp, synthetic construct
  source 1..20: mol_type = other DNA
catcctgaaagaaaacagat

SEQ ID NO: 28266 - DNA, 20 bp, synthetic construct
  source 1..20: mol_type = other DNA
catcctgacgcctcctcccc

SEQ ID NO: 28267 - DNA, 20 bp, synthetic construct
  source 1..20: mol_type = other DNA
tgcgtcagcgcctcctcccc

SEQ ID NO: 28268 - DNA, 20 bp, synthetic construct
  source 1..20: mol_type = other DNA
tgttttttctttaacctttc

SEQ ID NO: 28269 - DNA, 20 bp, synthetic construct
  source 1..20: mol_type = other DNA
gtacaccggaattgccagga

SEQ ID NO: 28270 - DNA, 20 bp, synthetic construct
  source 1..20: mol_type = other DNA
gtacaccgcgtcgagtttag

SEQ ID NO: 28271 - DNA, 20 bp, synthetic construct
  source 1..20: mol_type = other DNA
agtgtcctcaccttccaatt

SEQ ID NO: 28272 - DNA, 20 bp, synthetic construct
  source 1..20: mol_type = other DNA
tctttgattgcgtcaatcat

SEQ ID NO: 28273 - DNA, 20 bp, synthetic construct
  source 1..20: mol_type = other DNA
tcaggccccctccgcctcca

SEQ ID NO: 28274 - DNA, 20 bp, synthetic construct
  source 1..20: mol_type = other DNA
ccggtgtatcggttaggttt

SEQ ID NO: 28275 - DNA, 20 bp, synthetic construct
  source 1..20: mol_type = other DNA
taacacctcttcagtttccg

SEQ ID NO: 28276 - DNA, 20 bp, synthetic construct
  source 1..20: mol_type = other DNA
gctccggtagcagcaagttc

SEQ ID NO: 28277 - DNA, 20 bp, synthetic construct
  source 1..20: mol_type = other DNA
taaggcaaagcagcaagttc

SEQ ID NO: 28278 - DNA, 20 bp, synthetic construct
  source 1..20: mol_type = other DNA
tgttggggacctgacgctat

SEQ ID NO: 28279 - DNA, 20 bp, synthetic construct
  source 1..20: mol_type = other DNA
tgaaaattgagagtgcggat

SEQ ID NO: 28280 - DNA, 20 bp, synthetic construct
  source 1..20: mol_type = other DNA
aaccttcaattgtgagctcg

SEQ ID NO: 28281 - DNA, 20 bp, synthetic construct
  source 1..20: mol_type = other DNA
agaaagcgagacaggcaggt

SEQ ID NO: 28282 - DNA, 20 bp, synthetic construct
  source 1..20: mol_type = other DNA
tacgttaaagacaggcaggt

SEQ ID NO: 28283 - DNA, 20 bp, synthetic construct
  source 1..20: mol_type = other DNA
actcgaacctgccgctgtcg

SEQ ID NO: 28284 - DNA, 20 bp, synthetic construct
  source 1..20: mol_type = other DNA
tgcaagagggcaggctggat

SEQ ID NO: 28285 - DNA, 20 bp, synthetic construct
  source 1..20: mol_type = other DNA
ggtgtgagagcggaagtggc

SEQ ID NO: 28286 - DNA, 20 bp, synthetic construct
  source 1..20: mol_type = other DNA
cgccgccgcccggacccgcg

SEQ ID NO: 28287 - DNA, 20 bp, synthetic construct
  source 1..20: mol_type = other DNA
ctcttccgcttgcgctgccg

SEQ ID NO: 28288 - DNA, 20 bp, synthetic construct
  source 1..20: mol_type = other DNA
tggcctatcttgcgctgccg

SEQ ID NO: 28289 - DNA, 20 bp, synthetic construct
  source 1..20: mol_type = other DNA
tctagtgattccccgggata

SEQ ID NO: 28290 - DNA, 20 bp, synthetic construct
  source 1..20: mol_type = other DNA
aagtcgaggctgaaaactgt

SEQ ID NO: 28291 - DNA, 20 bp, synthetic construct
  source 1..20: mol_type = other DNA
aagtcgagttccccgggata

SEQ ID NO: 28292 - DNA, 20 bp, synthetic construct
  source 1..20: mol_type = other DNA
catgcgcagcggggccgtgg

SEQ ID NO: 28293 - DNA, 20 bp, synthetic construct
  source 1..20: mol_type = other DNA
ctcttacatcttttcctata

SEQ ID NO: 28294 - DNA, 20 bp, synthetic construct
  source 1..20: mol_type = other DNA
tggcatttcggacaaggggt

SEQ ID NO: 28295 - DNA, 20 bp, synthetic construct
  source 1..20: mol_type = other DNA
tggcattttcttttcctata

SEQ ID NO: 28296 - DNA, 20 bp, synthetic construct
  source 1..20: mol_type = other DNA
gtccccgccgccccgacgct

SEQ ID NO: 28297 - DNA, 20 bp, synthetic construct
  source 1..20: mol_type = other DNA
aggagtcacgccccgacgct

SEQ ID NO: 28298 - DNA, 20 bp, synthetic construct
  source 1..20: mol_type = other DNA
gccccgccggcggggcggtc

SEQ ID NO: 28299 - DNA, 20 bp, synthetic construct
  source 1..20: mol_type = other DNA
gggtccggcgagcatcacgc

SEQ ID NO: 28300 - DNA, 20 bp, synthetic construct
  source 1..20: mol_type = other DNA
tctgtgtcgagggcaatatt

SEQ ID NO: 28301 - DNA, 20 bp, synthetic construct
  source 1..20: mol_type = other DNA
ctgctttctgctggacgtaa

SEQ ID NO: 28302 - DNA, 20 bp, synthetic construct
  source 1..20: mol_type = other DNA
taaatccaaacattatgata

SEQ ID NO: 28303 - DNA, 20 bp, synthetic construct
  source 1..20: mol_type = other DNA
taaatccatcggccggagac

SEQ ID NO: 28304 - DNA, 20 bp, synthetic construct
  source 1..20: mol_type = other DNA
taagccctccagcggttagg

SEQ ID NO: 28305 - DNA, 20 bp, synthetic construct
  source 1..20: mol_type = other DNA
gtttaagagagtacagggta

SEQ ID NO: 28306 - DNA, 20 bp, synthetic construct
  source 1..20: mol_type = other DNA
caggtccttccccgggccct

SEQ ID NO: 28307 - DNA, 20 bp, synthetic construct
  source 1..20: mol_type = other DNA
ttttagataagttagatgtt

SEQ ID NO: 28308 - DNA, 20 bp, synthetic construct
  source 1..20: mol_type = other DNA
gtaaccgagtgattgcacat

SEQ ID NO: 28309 - DNA, 20 bp, synthetic construct
  source 1..20: mol_type = other DNA
ttcggagatctttactctac

SEQ ID NO: 28310 - DNA, 20 bp, synthetic construct
  source 1..20: mol_type = other DNA
gattctgtctgacgggcagt

SEQ ID NO: 28311 - DNA, 20 bp, synthetic construct
  source 1..20: mol_type = other DNA
ttgaaaagctgacgggcagt

SEQ ID NO: 28312 - DNA, 20 bp, synthetic construct
  source 1..20: mol_type = other DNA
atacaggccaatatcttgtt

SEQ ID NO: 28313 - DNA, 20 bp, synthetic construct
  source 1..20: mol_type = other DNA
atacaggctccctggggaag

SEQ ID NO: 28314 - DNA, 20 bp, synthetic construct
  source 1..20: mol_type = other DNA
tctggcccccaccttcttgg

SEQ ID NO: 28315 - DNA, 20 bp, synthetic construct
  source 1..20: mol_type = other DNA
acagtaccgtgcacatcagc

SEQ ID NO: 28316 - DNA, 20 bp, synthetic construct
  source 1..20: mol_type = other DNA
actcagtattaaggcttgtt

SEQ ID NO: 28317 - DNA, 20 bp, synthetic construct
  source 1..20: mol_type = other DNA
actctggtcctgatacatct

SEQ ID NO: 28318 - DNA, 20 bp, synthetic construct
  source 1..20: mol_type = other DNA
caaagcaagtaaggcttaga

SEQ ID NO: 28319 - DNA, 20 bp, synthetic construct
  source 1..20: mol_type = other DNA
taaaagaagctttgtccgat

SEQ ID NO: 28320 - DNA, 20 bp, synthetic construct
  source 1..20: mol_type = other DNA
cagcggcggcttttgctgca

SEQ ID NO: 28321 - DNA, 20 bp, synthetic construct
  source 1..20: mol_type = other DNA
gttttagagcttttgctgca

SEQ ID NO: 28322 - DNA, 20 bp, synthetic construct
  source 1..20: mol_type = other DNA
acggccgtgggaactcctcc

SEQ ID NO: 28323 - DNA, 20 bp, synthetic construct
  source 1..20: mol_type = other DNA
acggccgtatctcaaggcgt

SEQ ID NO: 28324 - DNA, 20 bp, synthetic construct
  source 1..20: mol_type = other DNA
cgccaaaagggaactcctcc

SEQ ID NO: 28325 - DNA, 20 bp, synthetic construct
  source 1..20: mol_type = other DNA
acacgcccagaggaaccttg

SEQ ID NO: 28326 - DNA, 20 bp, synthetic construct
  source 1..20: mol_type = other DNA
cataccccaaacaatccaaa

SEQ ID NO: 28327 - DNA, 20 bp, synthetic construct
  source 1..20: mol_type = other DNA
gtagagaagaaaattagtgg

SEQ ID NO: 28328 - DNA, 20 bp, synthetic construct
  source 1..20: mol_type = other DNA
gcagtaaagtatgtatatgt

SEQ ID NO: 28329 - DNA, 20 bp, synthetic construct
  source 1..20: mol_type = other DNA
ctctcgtagagggataggtg

SEQ ID NO: 28330 - DNA, 20 bp, synthetic construct
  source 1..20: mol_type = other DNA
ctctcgtatgtttcgcctcc

SEQ ID NO: 28331 - DNA, 20 bp, synthetic construct
  source 1..20: mol_type = other DNA
gaccgcgagccttgtgtgag

SEQ ID NO: 28332 - DNA, 20 bp, synthetic construct
  source 1..20: mol_type = other DNA
ttgtaaacgccttgtgtgag

SEQ ID NO: 28333 - DNA, 20 bp, synthetic construct
  source 1..20: mol_type = other DNA
cggagagcggtgcccgcgtc

SEQ ID NO: 28334 - DNA, 20 bp, synthetic construct
  source 1..20: mol_type = other DNA
gcaccttcccaggtctagca

SEQ ID NO: 28335 - DNA, 20 bp, synthetic construct
  source 1..20: mol_type = other DNA
ccctgtccagctgactgcaa

SEQ ID NO: 28336 - DNA, 20 bp, synthetic construct
  source 1..20: mol_type = other DNA
gggcagttagctgactgcaa

SEQ ID NO: 28337 - DNA, 20 bp, synthetic construct
  source 1..20: mol_type = other DNA
gtctccacctccgcctttgc

SEQ ID NO: 28338 - DNA, 20 bp, synthetic construct
  source 1..20: mol_type = other DNA
cgccgccgccgccgccgccg

SEQ ID NO: 28339 - DNA, 20 bp, synthetic construct
  source 1..20: mol_type = other DNA
tattcgtcccgccgccgccg

SEQ ID NO: 28340 - DNA, 20 bp, synthetic construct
  source 1..20: mol_type = other DNA
agggagctcccgatccgtgc

SEQ ID NO: 28341 - DNA, 20 bp, synthetic construct
  source 1..20: mol_type = other DNA
tacttaaatgcttaacgtag

SEQ ID NO: 28342 - DNA, 20 bp, synthetic construct
  source 1..20: mol_type = other DNA
aatttaaatgcttaacgtag

SEQ ID NO: 28343 - DNA, 20 bp, synthetic construct
  source 1..20: mol_type = other DNA
ttgagattttcacaacttga

SEQ ID NO: 28344 - DNA, 20 bp, synthetic construct
  source 1..20: mol_type = other DNA
gggtcaaacccgcagtaata

SEQ ID NO: 28345 - DNA, 20 bp, synthetic construct
  source 1..20: mol_type = other DNA
aagaagcgaggttcttttta

SEQ ID NO: 28346 - DNA, 20 bp, synthetic construct
  source 1..20: mol_type = other DNA
tacctcaatgcttaacacag

SEQ ID NO: 28347 - DNA, 20 bp, synthetic construct
  source 1..20: mol_type = other DNA
aagaatgcgggctgtatggc

SEQ ID NO: 28348 - DNA, 20 bp, synthetic construct
  source 1..20: mol_type = other DNA
cccctgttcctggaggcaag

SEQ ID NO: 28349 - DNA, 20 bp, synthetic construct
  source 1..20: mol_type = other DNA
ctcagaccgaccccacggag

SEQ ID NO: 28350 - DNA, 20 bp, synthetic construct
  source 1..20: mol_type = other DNA
cagtgagcgttcccaaaggg

SEQ ID NO: 28351 - DNA, 20 bp, synthetic construct
  source 1..20: mol_type = other DNA
tataatatcgacgcgttata

SEQ ID NO: 28352 - DNA, 20 bp, synthetic construct
  source 1..20: mol_type = other DNA
tataatatttttaatactgc

SEQ ID NO: 28353 - DNA, 20 bp, synthetic construct
  source 1..20: mol_type = other DNA
gcattaggttttaatactgc

SEQ ID NO: 28354 - DNA, 20 bp, synthetic construct
  source 1..20: mol_type = other DNA
ccgtacctaaggaagtagtg

SEQ ID NO: 28355 - DNA, 20 bp, synthetic construct
  source 1..20: mol_type = other DNA
ttaataagaaggaagtagtg

SEQ ID NO: 28356 - DNA, 20 bp, synthetic construct
  source 1..20: mol_type = other DNA
gtataaaatctgcaagtagt

SEQ ID NO: 28357 - DNA, 20 bp, synthetic construct
  source 1..20: mol_type = other DNA
gagcctccttctttcctgcc

SEQ ID NO: 28358 - DNA, 20 bp, synthetic construct
  source 1..20: mol_type = other DNA
acttattgtgttggagtgtc

SEQ ID NO: 28359 - DNA, 20 bp, synthetic construct
  source 1..20: mol_type = other DNA
caccacagttctggaggctg

SEQ ID NO: 28360 - DNA, 20 bp, synthetic construct
  source 1..20: mol_type = other DNA
tgtggagtttctggaggctg

SEQ ID NO: 28361 - DNA, 20 bp, synthetic construct
  source 1..20: mol_type = other DNA
gggaggagaaggcggcagcg

SEQ ID NO: 28362 - DNA, 20 bp, synthetic construct
  source 1..20: mol_type = other DNA
gggaggaggccatacgccat

SEQ ID NO: 28363 - DNA, 20 bp, synthetic construct
  source 1..20: mol_type = other DNA
gagggaggccacccatcaag

SEQ ID NO: 28364 - DNA, 20 bp, synthetic construct
  source 1..20: mol_type = other DNA
ggaagatggaaccaatcgca

SEQ ID NO: 28365 - DNA, 20 bp, synthetic construct
  source 1..20: mol_type = other DNA
gggccagccttgaactcgct

SEQ ID NO: 28366 - DNA, 20 bp, synthetic construct
  source 1..20: mol_type = other DNA
tggagagcctcttaaccgga

SEQ ID NO: 28367 - DNA, 20 bp, synthetic construct
  source 1..20: mol_type = other DNA
cccctctgctcttaaccgga

SEQ ID NO: 28368 - DNA, 20 bp, synthetic construct
  source 1..20: mol_type = other DNA
cgaggggtcccttcgcctgg

SEQ ID NO: 28369 - DNA, 20 bp, synthetic construct
  source 1..20: mol_type = other DNA
aacgttgcgtattgctacaa

SEQ ID NO: 28370 - DNA, 20 bp, synthetic construct
  source 1..20: mol_type = other DNA
aaattcttaattccattctt

SEQ ID NO: 28371 - DNA, 20 bp, synthetic construct
  source 1..20: mol_type = other DNA
tctccggtcatctactttgg

SEQ ID NO: 28372 - DNA, 20 bp, synthetic construct
  source 1..20: mol_type = other DNA
cggtgaacagctcctacccc

SEQ ID NO: 28373 - DNA, 20 bp, synthetic construct
  source 1..20: mol_type = other DNA
gaagaagagctgaggtttgc

SEQ ID NO: 28374 - DNA, 20 bp, synthetic construct
  source 1..20: mol_type = other DNA
cgccattcgagcatctagtt

SEQ ID NO: 28375 - DNA, 20 bp, synthetic construct
  source 1..20: mol_type = other DNA
gataggcgtctttatatagg

SEQ ID NO: 28376 - DNA, 20 bp, synthetic construct
  source 1..20: mol_type = other DNA
aattcctgagtgaacgaaca

SEQ ID NO: 28377 - DNA, 20 bp, synthetic construct
  source 1..20: mol_type = other DNA
catgctacaggctgttgctg

SEQ ID NO: 28378 - DNA, 20 bp, synthetic construct
  source 1..20: mol_type = other DNA
agcaattcgccagttgttgc

SEQ ID NO: 28379 - DNA, 20 bp, synthetic construct
  source 1..20: mol_type = other DNA
agttacatccatgccctaca

SEQ ID NO: 28380 - DNA, 20 bp, synthetic construct
  source 1..20: mol_type = other DNA
cgcttcactgtccctggact

SEQ ID NO: 28381 - DNA, 20 bp, synthetic construct
  source 1..20: mol_type = other DNA
ggcaggctggctgggtaccg

SEQ ID NO: 28382 - DNA, 20 bp, synthetic construct
  source 1..20: mol_type = other DNA
ggcaggctggctgggtgggt

SEQ ID NO: 28383 - DNA, 20 bp, synthetic construct
  source 1..20: mol_type = other DNA
ccagctaaggctgggtaccg

SEQ ID NO: 28384 - DNA, 20 bp, synthetic construct
  source 1..20: mol_type = other DNA
tttatatttgtatgtcttat

SEQ ID NO: 28385 - DNA, 20 bp, synthetic construct
  source 1..20: mol_type = other DNA
aaatgctagattttacttta

SEQ ID NO: 28386 - DNA, 20 bp, synthetic construct
  source 1..20: mol_type = other DNA
gctatccactgcatcatctc

SEQ ID NO: 28387 - DNA, 20 bp, synthetic construct
  source 1..20: mol_type = other DNA
ttaccattctgcatcatctc

SEQ ID NO: 28388 - DNA, 20 bp, synthetic construct
  source 1..20: mol_type = other DNA
gagtgattacctggggcgct

SEQ ID NO: 28389 - DNA, 20 bp, synthetic construct
  source 1..20: mol_type = other DNA
gagtgatttttaaaacttac

SEQ ID NO: 28390 - DNA, 20 bp, synthetic construct
  source 1..20: mol_type = other DNA
agaatccatttaaaacttac

SEQ ID NO: 28391 - DNA, 20 bp, synthetic construct
  source 1..20: mol_type = other DNA
tcgcaaccgtttgtttcata

SEQ ID NO: 28392 - DNA, 20 bp, synthetic construct
  source 1..20: mol_type = other DNA
attgccaagtttgtttcata

SEQ ID NO: 28393 - DNA, 20 bp, synthetic construct
  source 1..20: mol_type = other DNA
ggccttgttctgaatgcaca

SEQ ID NO: 28394 - DNA, 20 bp, synthetic construct
  source 1..20: mol_type = other DNA
gtgcttcaatccaatgattg

SEQ ID NO: 28395 - DNA, 20 bp, synthetic construct
  source 1..20: mol_type = other DNA
taatacggaactccatttcc

SEQ ID NO: 28396 - DNA, 20 bp, synthetic construct
  source 1..20: mol_type = other DNA
taatacggggggtgcaacga

SEQ ID NO: 28397 - DNA, 20 bp, synthetic construct
  source 1..20: mol_type = other DNA
agcactaaaactccatttcc

SEQ ID NO: 28398 - DNA, 20 bp, synthetic construct
  source 1..20: mol_type = other DNA
gagctatcaaggacaagaaa

SEQ ID NO: 28399 - DNA, 20 bp, synthetic construct
  source 1..20: mol_type = other DNA
gacctaagctaactcattaa

SEQ ID NO: 28400 - DNA, 20 bp, synthetic construct
  source 1..20: mol_type = other DNA
gagctggtcgctgtcggcta

SEQ ID NO: 28401 - DNA, 20 bp, synthetic construct
  source 1..20: mol_type = other DNA
cttgcaaccgctgtcggcta

SEQ ID NO: 28402 - DNA, 20 bp, synthetic construct
  source 1..20: mol_type = other DNA
gaagcctgcgataggtgagt

SEQ ID NO: 28403 - DNA, 20 bp, synthetic construct
  source 1..20: mol_type = other DNA
tggattccgacccacacgcg

SEQ ID NO: 28404 - DNA, 20 bp, synthetic construct
  source 1..20: mol_type = other DNA
attttattatattttattca

SEQ ID NO: 28405 - DNA, 20 bp, synthetic construct
  source 1..20: mol_type = other DNA
ttctatgaagagatgccttg

SEQ ID NO: 28406 - DNA, 20 bp, synthetic construct
  source 1..20: mol_type = other DNA
ttaatgcatttagtaattta

SEQ ID NO: 28407 - DNA, 20 bp, synthetic construct
  source 1..20: mol_type = other DNA
cagtgccacgttgtgagttg

SEQ ID NO: 28408 - DNA, 20 bp, synthetic construct
  source 1..20: mol_type = other DNA
cagtgccagacatcacaggt

SEQ ID NO: 28409 - DNA, 20 bp, synthetic construct
  source 1..20: mol_type = other DNA
ttgttacccctcgaactcct

SEQ ID NO: 28410 - DNA, 20 bp, synthetic construct
  source 1..20: mol_type = other DNA
cgacatcgaggatggcgcgt

SEQ ID NO: 28411 - DNA, 20 bp, synthetic construct
  source 1..20: mol_type = other DNA
tacttctcaggatggcgcgt

SEQ ID NO: 28412 - DNA, 20 bp, synthetic construct
  source 1..20: mol_type = other DNA
gtgatgtcaattggtcttta

SEQ ID NO: 28413 - DNA, 20 bp, synthetic construct
  source 1..20: mol_type = other DNA
caaggactttacatataagt

SEQ ID NO: 28414 - DNA, 20 bp, synthetic construct
  source 1..20: mol_type = other DNA
ggaaactccccaagggaatc

SEQ ID NO: 28415 - DNA, 20 bp, synthetic construct
  source 1..20: mol_type = other DNA
attgttatcccaagggaatc

SEQ ID NO: 28416 - DNA, 20 bp, synthetic construct
  source 1..20: mol_type = other DNA
atatacacatattggttttt

SEQ ID NO: 28417 - DNA, 20 bp, synthetic construct
  source 1..20: mol_type = other DNA
tagccacgatattggttttt

SEQ ID NO: 28418 - DNA, 20 bp, synthetic construct
  source 1..20: mol_type = other DNA
tcttccaccagaagggcctc

SEQ ID NO: 28419 - DNA, 20 bp, synthetic construct
  source 1..20: mol_type = other DNA
aaggtaggcagaagggcctc

SEQ ID NO: 28420 - DNA, 20 bp, synthetic construct
  source 1..20: mol_type = other DNA
tcttccacgcttctaaagat

SEQ ID NO: 28421 - DNA, 20 bp, synthetic construct
  source 1..20: mol_type = other DNA
ccttctaacagccaggtcat

SEQ ID NO: 28422 - DNA, 20 bp, synthetic construct
  source 1..20: mol_type = other DNA
aaggagcccagccaggtcat

SEQ ID NO: 28423 - DNA, 20 bp, synthetic construct
  source 1..20: mol_type = other DNA
attctttggttttatagcca

SEQ ID NO: 28424 - DNA, 20 bp, synthetic construct
  source 1..20: mol_type = other DNA
gttaccatcctagagacatg

SEQ ID NO: 28425 - DNA, 20 bp, synthetic construct
  source 1..20: mol_type = other DNA
cggcaacaatagctattgga

SEQ ID NO: 28426 - DNA, 20 bp, synthetic construct
  source 1..20: mol_type = other DNA
tagaggactagcaaccgtta

SEQ ID NO: 28427 - DNA, 20 bp, synthetic construct
  source 1..20: mol_type = other DNA
ctgaaggtaccccgcgcgcg

SEQ ID NO: 28428 - DNA, 20 bp, synthetic construct
  source 1..20: mol_type = other DNA
gccaacacggtacacattgt

SEQ ID NO: 28429 - DNA, 20 bp, synthetic construct
  source 1..20: mol_type = other DNA
ccggggtcggctgggacaga

SEQ ID NO: 28430 - DNA, 20 bp, synthetic construct
  source 1..20: mol_type = other DNA
cctacgacggctggtcacta

SEQ ID NO: 28431 - DNA, 20 bp, synthetic construct
  source 1..20: mol_type = other DNA
agataagactgctgtggctg

SEQ ID NO: 28432 - DNA, 20 bp, synthetic construct
  source 1..20: mol_type = other DNA
catgcttctcatgcaacacc

SEQ ID NO: 28433 - DNA, 20 bp, synthetic construct
  source 1..20: mol_type = other DNA
cactctatgattgctcctac

SEQ ID NO: 28434 - DNA, 20 bp, synthetic construct
  source 1..20: mol_type = other DNA
cactctattgcattctactt

SEQ ID NO: 28435 - DNA, 20 bp, synthetic construct
  source 1..20: mol_type = other DNA
gccccgcctctaacctaaca

SEQ ID NO: 28436 - DNA, 20 bp, synthetic construct
  source 1..20: mol_type = other DNA
tcaggcccgagtttgaatac

SEQ ID NO: 28437 - DNA, 20 bp, synthetic construct
  source 1..20: mol_type = other DNA
gtgactatcctccgcctcca

SEQ ID NO: 28438 - DNA, 20 bp, synthetic construct
  source 1..20: mol_type = other DNA
ggcgggctaataatcgaggg

SEQ ID NO: 28439 - DNA, 20 bp, synthetic construct
  source 1..20: mol_type = other DNA
cgaaggcggcccaccacctc

SEQ ID NO: 28440 - DNA, 20 bp, synthetic construct
  source 1..20: mol_type = other DNA
ctgctgctccctaatccgac

SEQ ID NO: 28441 - DNA, 20 bp, synthetic construct
  source 1..20: mol_type = other DNA
caggtcctggagtcccgtaa

SEQ ID NO: 28442 - DNA, 20 bp, synthetic construct
  source 1..20: mol_type = other DNA
ctctgtgtagccgtcccatc

SEQ ID NO: 28443 - DNA, 20 bp, synthetic construct
  source 1..20: mol_type = other DNA
cgcaccacgattggagaata

SEQ ID NO: 28444 - DNA, 20 bp, synthetic construct
  source 1..20: mol_type = other DNA
ttagtagtagatacatctaa

SEQ ID NO: 28445 - DNA, 20 bp, synthetic construct
  source 1..20: mol_type = other DNA
tgtttgctgtcttccattgg

SEQ ID NO: 28446 - DNA, 20 bp, synthetic construct
  source 1..20: mol_type = other DNA
tacaacatccgagtacctat

SEQ ID NO: 28447 - DNA, 20 bp, synthetic construct
  source 1..20: mol_type = other DNA
ccggtattcgcctcgaggcg

SEQ ID NO: 28448 - DNA, 20 bp, synthetic construct
  source 1..20: mol_type = other DNA
tttccgcatcaaggtctcga

SEQ ID NO: 28449 - DNA, 20 bp, synthetic construct
  source 1..20: mol_type = other DNA
ctctgagcttctggcaagta

SEQ ID NO: 28450 - DNA, 20 bp, synthetic construct
  source 1..20: mol_type = other DNA
ctcctggcatgccgtggttc

SEQ ID NO: 28451 - DNA, 20 bp, synthetic construct
  source 1..20: mol_type = other DNA
actgcatggccagcgctagg

SEQ ID NO: 28452 - DNA, 20 bp, synthetic construct
  source 1..20: mol_type = other DNA
cagcggccgcggtggctgag

SEQ ID NO: 28453 - DNA, 20 bp, synthetic construct
  source 1..20: mol_type = other DNA
aaggtcctactgctcacgca

SEQ ID NO: 28454 - DNA, 20 bp, synthetic construct
  source 1..20: mol_type = other DNA
aagtccagataacagccaag

SEQ ID NO: 28455 - DNA, 20 bp, synthetic construct
  source 1..20: mol_type = other DNA
tcttcgtcctgctcgcgctg

SEQ ID NO: 28456 - DNA, 20 bp, synthetic construct
  source 1..20: mol_type = other DNA
tcttcgtcgccgctctctct

SEQ ID NO: 28457 - DNA, 20 bp, synthetic construct
  source 1..20: mol_type = other DNA
ccccggccgtcgcggagcct

SEQ ID NO: 28458 - DNA, 20 bp, synthetic construct
  source 1..20: mol_type = other DNA
tctcttccggctgttcaaga

SEQ ID NO: 28459 - DNA, 20 bp, synthetic construct
  source 1..20: mol_type = other DNA
ctcgcctatttctgggctcg

SEQ ID NO: 28460 - DNA, 20 bp, synthetic construct
  source 1..20: mol_type = other DNA
gcacctgctatagctcttcc

SEQ ID NO: 28461 - DNA, 20 bp, synthetic construct
  source 1..20: mol_type = other DNA
ccgcttctgctaatcaaaac

SEQ ID NO: 28462 - DNA, 20 bp, synthetic construct
  source 1..20: mol_type = other DNA
acaacagagttttcttgaag

SEQ ID NO: 28463 - DNA, 20 bp, synthetic construct
  source 1..20: mol_type = other DNA
acaacagatcacaggattca

SEQ ID NO: 28464 - DNA, 20 bp, synthetic construct
  source 1..20: mol_type = other DNA
gaggttatgttttcttgaag

SEQ ID NO: 28465 - DNA, 20 bp, synthetic construct
  source 1..20: mol_type = other DNA
aacaatacgagcgggtcccc

SEQ ID NO: 28466 - DNA, 20 bp, synthetic construct
  source 1..20: mol_type = other DNA
aggaactccagaccttccta

SEQ ID NO: 28467 - DNA, 20 bp, synthetic construct
  source 1..20: mol_type = other DNA
aggaactcgcttttagagcc

SEQ ID NO: 28468 - DNA, 20 bp, synthetic construct
  source 1..20: mol_type = other DNA
cacggactcagaccttccta

SEQ ID NO: 28469 - DNA, 20 bp, synthetic construct
  source 1..20: mol_type = other DNA
gagggaggaagggatagcca

SEQ ID NO: 28470 - DNA, 20 bp, synthetic construct
  source 1..20: mol_type = other DNA
cagcgcgggaataagcctta

SEQ ID NO: 28471 - DNA, 20 bp, synthetic construct
  source 1..20: mol_type = other DNA
aagctctggaaagcaacgcc

SEQ ID NO: 28472 - DNA, 20 bp, synthetic construct
  source 1..20: mol_type = other DNA
tcatccgcagtgcaatttga

SEQ ID NO: 28473 - DNA, 20 bp, synthetic construct
  source 1..20: mol_type = other DNA
ctccttggggtcggcgtctg

SEQ ID NO: 28474 - DNA, 20 bp, synthetic construct
  source 1..20: mol_type = other DNA
gtacgtgtcgaaactttgcc

SEQ ID NO: 28475 - DNA, 20 bp, synthetic construct
  source 1..20: mol_type = other DNA
cgcatccacgaaactttgcc

SEQ ID NO: 28476 - DNA, 20 bp, synthetic construct
  source 1..20: mol_type = other DNA
tgattctaggctggtcacac

SEQ ID NO: 28477 - DNA, 20 bp, synthetic construct
  source 1..20: mol_type = other DNA
gcgggctgacgcataaacac

SEQ ID NO: 28478 - DNA, 20 bp, synthetic construct
  source 1..20: mol_type = other DNA
atctagtgctcgcgccggct

SEQ ID NO: 28479 - DNA, 20 bp, synthetic construct
  source 1..20: mol_type = other DNA
ctgttgaaggcctaacaacc

SEQ ID NO: 28480 - DNA, 20 bp, synthetic construct
  source 1..20: mol_type = other DNA
gctcgcttggcctaacaacc

SEQ ID NO: 28481 - DNA, 20 bp, synthetic construct
  source 1..20: mol_type = other DNA
ctgttgaacagaatcaggga

SEQ ID NO: 28482 - DNA, 20 bp, synthetic construct
  source 1..20: mol_type = other DNA
ctcggcgctacccaacctac

SEQ ID NO: 28483 - DNA, 20 bp, synthetic construct
  source 1..20: mol_type = other DNA
gcaatgtgagaggcctgcgg

SEQ ID NO: 28484 - DNA, 20 bp, synthetic construct
  source 1..20: mol_type = other DNA
ctcggcgcagaggcctgcgg

SEQ ID NO: 28485 - DNA, 20 bp, synthetic construct
  source 1..20: mol_type = other DNA
gcattgccaacaaggagaag

SEQ ID NO: 28486 - DNA, 20 bp, synthetic construct
  source 1..20: mol_type = other DNA
attggctaaacaaggagaag

SEQ ID NO: 28487 - DNA, 20 bp, synthetic construct
  source 1..20: mol_type = other DNA
atacttacaccttgtcctac

SEQ ID NO: 28488 - DNA, 20 bp, synthetic construct
  source 1..20: mol_type = other DNA
ttcgagagcctctgtcggat

SEQ ID NO: 28489 - DNA, 20 bp, synthetic construct
  source 1..20: mol_type = other DNA
tattgcatacccgtttttaa

SEQ ID NO: 28490 - DNA, 20 bp, synthetic construct
  source 1..20: mol_type = other DNA
tctggctcccaaaaagatgg

SEQ ID NO: 28491 - DNA, 20 bp, synthetic construct
  source 1..20: mol_type = other DNA
ctctcctgaacaaaagatgg

SEQ ID NO: 28492 - DNA, 20 bp, synthetic construct
  source 1..20: mol_type = other DNA
cgattgtgcacgccatgaac

SEQ ID NO: 28493 - DNA, 20 bp, synthetic construct
  source 1..20: mol_type = other DNA
actcactggtaaaggctccg

SEQ ID NO: 28494 - DNA, 20 bp, synthetic construct
  source 1..20: mol_type = other DNA
tggtggcacacgccatgaac

SEQ ID NO: 28495 - DNA, 20 bp, synthetic construct
  source 1..20: mol_type = other DNA
aatggacacaccaaatgtct

SEQ ID NO: 28496 - DNA, 20 bp, synthetic construct
  source 1..20: mol_type = other DNA
gaagcctgactagattctct

SEQ ID NO: 28497 - DNA, 20 bp, synthetic construct
  source 1..20: mol_type = other DNA
gggaaagcctttaacttggc

SEQ ID NO: 28498 - DNA, 20 bp, synthetic construct
  source 1..20: mol_type = other DNA
acagcctgctttaacttggc

SEQ ID NO: 28499 - DNA, 20 bp, synthetic construct
  source 1..20: mol_type = other DNA
agagagtgctctgagcactg

SEQ ID NO: 28500 - DNA, 20 bp, synthetic construct
  source 1..20: mol_type = other DNA
tgggtctgggtgtgagctgt

SEQ ID NO: 28501 - DNA, 20 bp, synthetic construct
  source 1..20: mol_type = other DNA
tttgttttccagtatgtacg

SEQ ID NO: 28502 - DNA, 20 bp, synthetic construct
  source 1..20: mol_type = other DNA
gagcttgtctgagtggaggc

SEQ ID NO: 28503 - DNA, 20 bp, synthetic construct
  source 1..20: mol_type = other DNA
tgaacaagggacaatctaag

SEQ ID NO: 28504 - DNA, 20 bp, synthetic construct
  source 1..20: mol_type = other DNA
ctcgaccacagatgctctga

SEQ ID NO: 28505 - DNA, 20 bp, synthetic construct
  source 1..20: mol_type = other DNA
tggtttagcagatgctctga

SEQ ID NO: 28506 - DNA, 20 bp, synthetic construct
  source 1..20: mol_type = other DNA
attgtggtataaatggaata

SEQ ID NO: 28507 - DNA, 20 bp, synthetic construct
  source 1..20: mol_type = other DNA
gccacataataaatggaata

SEQ ID NO: 28508 - DNA, 20 bp, synthetic construct
  source 1..20: mol_type = other DNA
agcggggcaaacagtgagtg

SEQ ID NO: 28509 - DNA, 20 bp, synthetic construct
  source 1..20: mol_type = other DNA
ttaccctaaaacagtgagtg

SEQ ID NO: 28510 - DNA, 20 bp, synthetic construct
  source 1..20: mol_type = other DNA
gaagaagaaggtgtcaacca

SEQ ID NO: 28511 - DNA, 20 bp, synthetic construct
  source 1..20: mol_type = other DNA
cttgctcaatgccacagcca

SEQ ID NO: 28512 - DNA, 20 bp, synthetic construct
  source 1..20: mol_type = other DNA
gaatattaaatgaaaggaga

SEQ ID NO: 28513 - DNA, 20 bp, synthetic construct
  source 1..20: mol_type = other DNA
ccgtgggcttttctgtttgg

SEQ ID NO: 28514 - DNA, 20 bp, synthetic construct
  source 1..20: mol_type = other DNA
gtgacttctagagctcagtg

SEQ ID NO: 28515 - DNA, 20 bp, synthetic construct
  source 1..20: mol_type = other DNA
acgggtgctgggacaatcgg

SEQ ID NO: 28516 - DNA, 20 bp, synthetic construct
  source 1..20: mol_type = other DNA
aggtgtgaagagcctattga

SEQ ID NO: 28517 - DNA, 20 bp, synthetic construct
  source 1..20: mol_type = other DNA
aggtgtgaccccaggtcgac

SEQ ID NO: 28518 - DNA, 20 bp, synthetic construct
  source 1..20: mol_type = other DNA
tcataaagcgaattggattg

SEQ ID NO: 28519 - DNA, 20 bp, synthetic construct
  source 1..20: mol_type = other DNA
accatatagctattggattg

SEQ ID NO: 28520 - DNA, 20 bp, synthetic construct
  source 1..20: mol_type = other DNA
tccctcggtcgagtcatcat

SEQ ID NO: 28521 - DNA, 20 bp, synthetic construct
  source 1..20: mol_type = other DNA
atcggatataagagtactga

SEQ ID NO: 28522 - DNA, 20 bp, synthetic construct
  source 1..20: mol_type = other DNA
gaaaagagggcctcagacag

SEQ ID NO: 28523 - DNA, 20 bp, synthetic construct
  source 1..20: mol_type = other DNA
agtacaccccaatctcccag

SEQ ID NO: 28524 - DNA, 20 bp, synthetic construct
  source 1..20: mol_type = other DNA
agtacaccgagcggcatgga

SEQ ID NO: 28525 - DNA, 20 bp, synthetic construct
  source 1..20: mol_type = other DNA
ccacgtacggggtgacattg

SEQ ID NO: 28526 - DNA, 20 bp, synthetic construct
  source 1..20: mol_type = other DNA
ggggtctgattcgacgtcat

SEQ ID NO: 28527 - DNA, 20 bp, synthetic construct
  source 1..20: mol_type = other DNA
gtttgcatggatccaagacc

SEQ ID NO: 28528 - DNA, 20 bp, synthetic construct
  source 1..20: mol_type = other DNA
atcatcaactgtttactccc

SEQ ID NO: 28529 - DNA, 20 bp, synthetic construct
  source 1..20: mol_type = other DNA
gagacccaggtcgaggtccg

SEQ ID NO: 28530 - DNA, 20 bp, synthetic construct
  source 1..20: mol_type = other DNA
ccgcaggttgtgtagagtcg

SEQ ID NO: 28531 - DNA, 20 bp, synthetic construct
  source 1..20: mol_type = other DNA
ggttaaaaatagttttaata

SEQ ID NO: 28532 - DNA, 20 bp, synthetic construct
  source 1..20: mol_type = other DNA
cgaatatcgttggagaattc

SEQ ID NO: 28533 - DNA, 20 bp, synthetic construct
  source 1..20: mol_type = other DNA
aggtcccgagaccagtgttt

SEQ ID NO: 28534 - DNA, 20 bp, synthetic construct
  source 1..20: mol_type = other DNA
caagattcgagttgtgaacg

SEQ ID NO: 28535 - DNA, 20 bp, synthetic construct
  source 1..20: mol_type = other DNA
atatctcagggagctggcga

SEQ ID NO: 28536 - DNA, 20 bp, synthetic construct
  source 1..20: mol_type = other DNA
atatctcattttctaacttc

SEQ ID NO: 28537 - DNA, 20 bp, synthetic construct
  source 1..20: mol_type = other DNA
cgtgcatgattgagatagtc

SEQ ID NO: 28538 - DNA, 20 bp, synthetic construct
  source 1..20: mol_type = other DNA
tcagttcagtcgagtggtgg

SEQ ID NO: 28539 - DNA, 20 bp, synthetic construct
  source 1..20: mol_type = other DNA
tcagttcaaatatcgacctc

SEQ ID NO: 28540 - DNA, 20 bp, synthetic construct
  source 1..20: mol_type = other DNA
tttaagctcaaactgcttaa

SEQ ID NO: 28541 - DNA, 20 bp, synthetic construct
  source 1..20: mol_type = other DNA
gcataccctcttttaataaa

SEQ ID NO: 28542 - DNA, 20 bp, synthetic construct
  source 1..20: mol_type = other DNA
gccttctcctataaattcta

SEQ ID NO: 28543 - DNA, 20 bp, synthetic construct
  source 1..20: mol_type = other DNA
taaagaggagccccgccagc

SEQ ID NO: 28544 - DNA, 20 bp, synthetic construct
  source 1..20: mol_type = other DNA
gttctttgggaacgctctcg

SEQ ID NO: 28545 - DNA, 20 bp, synthetic construct
  source 1..20: mol_type = other DNA
ccctggaaggaacgctctcg

SEQ ID NO: 28546 - DNA, 20 bp, synthetic construct
  source 1..20: mol_type = other DNA
actcaacaatttctccaaca

SEQ ID NO: 28547 - DNA, 20 bp, synthetic construct
  source 1..20: mol_type = other DNA
gccctacgtcgggggctccc

SEQ ID NO: 28548 - DNA, 20 bp, synthetic construct
  source 1..20: mol_type = other DNA
tggcacaactggggagtgac

SEQ ID NO: 28549 - DNA, 20 bp, synthetic construct
  source 1..20: mol_type = other DNA
gtctgcagggtactcagcgg

SEQ ID NO: 28550 - DNA, 20 bp, synthetic construct
  source 1..20: mol_type = other DNA
acacgctttagctcgcgttt

SEQ ID NO: 28551 - DNA, 20 bp, synthetic construct
  source 1..20: mol_type = other DNA
ctctatgcccctggattggc

SEQ ID NO: 28552 - DNA, 20 bp, synthetic construct
  source 1..20: mol_type = other DNA
aacggaaaatcccgttgtaa

SEQ ID NO: 28553 - DNA, 20 bp, synthetic construct
  source 1..20: mol_type = other DNA
ggacctggatcatcggccgt

SEQ ID NO: 28554 - DNA, 20 bp, synthetic construct
  source 1..20: mol_type = other DNA
ttccccttagttggcccaga

SEQ ID NO: 28555 - DNA, 20 bp, synthetic construct
  source 1..20: mol_type = other DNA
gggtggggtccctcaagttg

SEQ ID NO: 28556 - DNA, 20 bp, synthetic construct
  source 1..20: mol_type = other DNA
caagggtacattttttttca

SEQ ID NO: 28557 - DNA, 20 bp, synthetic construct
  source 1..20: mol_type = other DNA
aagaccagatcaattaaatg

SEQ ID NO: 28558 - DNA, 20 bp, synthetic construct
  source 1..20: mol_type = other DNA
agaaatgaggacctcagttg

SEQ ID NO: 28559 - DNA, 20 bp, synthetic construct
  source 1..20: mol_type = other DNA
ttgcggcgatgaaatgaaat

SEQ ID NO: 28560 - DNA, 20 bp, synthetic construct
  source 1..20: mol_type = other DNA
tcccagccaatagaaagtga

SEQ ID NO: 28561 - DNA, 20 bp, synthetic construct
  source 1..20: mol_type = other DNA
gcctccctccagcgacggcc

SEQ ID NO: 28562 - DNA, 20 bp, synthetic construct
  source 1..20: mol_type = other DNA
tggacaaagcctacgccggt

SEQ ID NO: 28563 - DNA, 20 bp, synthetic construct
  source 1..20: mol_type = other DNA
ggcggcccgcagcgggataa

SEQ ID NO: 28564 - DNA, 20 bp, synthetic construct
  source 1..20: mol_type = other DNA
taagtgaggcactagaacga

SEQ ID NO: 28565 - DNA, 20 bp, synthetic construct
  source 1..20: mol_type = other DNA
aagccccagcgctctagagc

SEQ ID NO: 28566 - DNA, 20 bp, synthetic construct
  source 1..20: mol_type = other DNA
ggttgtggttctgcatgttt

SEQ ID NO: 28567 - DNA, 20 bp, synthetic construct
  source 1..20: mol_type = other DNA
caattgtgttttacttgtca

SEQ ID NO: 28568 - DNA, 20 bp, synthetic construct
  source 1..20: mol_type = other DNA
caattgtggggccaaaccac

SEQ ID NO: 28569 - DNA, 20 bp, synthetic construct
  source 1..20: mol_type = other DNA
aaaacatccactccctgtaa

SEQ ID NO: 28570 - DNA, 20 bp, synthetic construct
  source 1..20: mol_type = other DNA
tccggtcacactccctgtaa

SEQ ID NO: 28571 - DNA, 20 bp, synthetic construct
  source 1..20: mol_type = other DNA
aatatccccacaagctgttt

SEQ ID NO: 28572 - DNA, 20 bp, synthetic construct
  source 1..20: mol_type = other DNA
cctcggcttgggtaaggcga

SEQ ID NO: 28573 - DNA, 20 bp, synthetic construct
  source 1..20: mol_type = other DNA
ggcacaaatgggtaaggcga

SEQ ID NO: 28574 - DNA, 20 bp, synthetic construct
  source 1..20: mol_type = other DNA
cctcggctgcccgttccacg

SEQ ID NO: 28575 - DNA, 20 bp, synthetic construct
  source 1..20: mol_type = other DNA
tgaaacacacaagaggacca

SEQ ID NO: 28576 - DNA, 20 bp, synthetic construct
  source 1..20: mol_type = other DNA
ccactcaattatgtcataag

SEQ ID NO: 28577 - DNA, 20 bp, synthetic construct
  source 1..20: mol_type = other DNA
aaagaaagcaataaaattaa

SEQ ID NO: 28578 - DNA, 20 bp, synthetic construct
  source 1..20: mol_type = other DNA
ggctgacctgctttgccttg

SEQ ID NO: 28579 - DNA, 20 bp, synthetic construct
  source 1..20: mol_type = other DNA
agacacaagcatacttctgc

SEQ ID NO: 28580 - DNA, 20 bp, synthetic construct
  source 1..20: mol_type = other DNA
catgctttgcatacttctgc

SEQ ID NO: 28581 - DNA, 20 bp, synthetic construct
  source 1..20: mol_type = other DNA
cacaacaccaacagaagacc

SEQ ID NO: 28582 - DNA, 20 bp, synthetic construct
  source 1..20: mol_type = other DNA
gtcacgtggattcttcaggg

SEQ ID NO: 28583 - DNA, 20 bp, synthetic construct
  source 1..20: mol_type = other DNA
ggagcatgatagtaataatt

SEQ ID NO: 28584 - DNA, 20 bp, synthetic construct
  source 1..20: mol_type = other DNA
ttacggagtattttgtccgc

SEQ ID NO: 28585 - DNA, 20 bp, synthetic construct
  source 1..20: mol_type = other DNA
ttaacaaggtcgacagcgcc

SEQ ID NO: 28586 - DNA, 20 bp, synthetic construct
  source 1..20: mol_type = other DNA
cgtcacttcgtttgtaacaa

SEQ ID NO: 28587 - DNA, 20 bp, synthetic construct
  source 1..20: mol_type = other DNA
gtcccatgcgtcctctgccc

SEQ ID NO: 28588 - DNA, 20 bp, synthetic construct
  source 1..20: mol_type = other DNA
gtcccatgatagagagtgaa

SEQ ID NO: 28589 - DNA, 20 bp, synthetic construct
  source 1..20: mol_type = other DNA
aagttcgccgtcctctgccc

SEQ ID NO: 28590 - DNA, 20 bp, synthetic construct
  source 1..20: mol_type = other DNA
gtagtaggcttcagacttga

SEQ ID NO: 28591 - DNA, 20 bp, synthetic construct
  source 1..20: mol_type = other DNA
aaagccactgttgttgttac

SEQ ID NO: 28592 - DNA, 20 bp, synthetic construct
  source 1..20: mol_type = other DNA
ggaaaaggacaagatatttg

SEQ ID NO: 28593 - DNA, 20 bp, synthetic construct
  source 1..20: mol_type = other DNA
ggaaaaggcgccaggcccct

SEQ ID NO: 28594 - DNA, 20 bp, synthetic construct
  source 1..20: mol_type = other DNA
cgggtattctatagccggcg

SEQ ID NO: 28595 - DNA, 20 bp, synthetic construct
  source 1..20: mol_type = other DNA
gccgtttcgtagtgaccggc

SEQ ID NO: 28596 - DNA, 20 bp, synthetic construct
  source 1..20: mol_type = other DNA
tttctttcgtagtgttcttt

SEQ ID NO: 28597 - DNA, 20 bp, synthetic construct
  source 1..20: mol_type = other DNA
agacacctagggatcgtcaa

SEQ ID NO: 28598 - DNA, 20 bp, synthetic construct
  source 1..20: mol_type = other DNA
ccccacctagggattactcc

SEQ ID NO: 28599 - DNA, 20 bp, synthetic construct
  source 1..20: mol_type = other DNA
tggcaaatagggatttcttg

SEQ ID NO: 28600 - DNA, 20 bp, synthetic construct
  source 1..20: mol_type = other DNA
cgggtcctagggatccggcg

SEQ ID NO: 28601 - DNA, 20 bp, synthetic construct
  source 1..20: mol_type = other DNA
aattcctttaggatcgtcaa

SEQ ID NO: 28602 - DNA, 20 bp, synthetic construct
  source 1..20: mol_type = other DNA
gaatcgagaaaagccacgga

SEQ ID NO: 28603 - DNA, 20 bp, synthetic construct
  source 1..20: mol_type = other DNA
aattcctttaaagccgtcaa

SEQ ID NO: 28604 - DNA, 20 bp, synthetic construct
  source 1..20: mol_type = other DNA
ttccggggagaagccacgga

SEQ ID NO: 28605 - DNA, 20 bp, synthetic construct
  source 1..20: mol_type = other DNA
ttccggggagaagccgtcaa

SEQ ID NO: 28606 - DNA, 20 bp, synthetic construct
  source 1..20: mol_type = other DNA
tggcaaagagaagcttcttg

SEQ ID NO: 28607 - DNA, 20 bp, synthetic construct
  source 1..20: mol_type = other DNA
ccccggggagaagctactcc

SEQ ID NO: 28608 - DNA, 20 bp, synthetic construct
  source 1..20: mol_type = other DNA
gaatcgagaaaggacacgga

SEQ ID NO: 28609 - DNA, 20 bp, synthetic construct
  source 1..20: mol_type = other DNA
aattcctttaaggacgtcaa

SEQ ID NO: 28610 - DNA, 20 bp, synthetic construct
  source 1..20: mol_type = other DNA
gccgtctccaaggaaccggc

SEQ ID NO: 28611 - DNA, 20 bp, synthetic construct
  source 1..20: mol_type = other DNA
gaagcctccaaggaagccat

SEQ ID NO: 28612 - DNA, 20 bp, synthetic construct
  source 1..20: mol_type = other DNA
gaagcctccaaggacacgga

SEQ ID NO: 28613 - DNA, 20 bp, synthetic construct
  source 1..20: mol_type = other DNA
cccgcctccaaggatactcc

SEQ ID NO: 28614 - DNA, 20 bp, synthetic construct
  source 1..20: mol_type = other DNA
cccgtggatctagagctgaa

SEQ ID NO: 28615 - DNA, 20 bp, synthetic construct
  source 1..20: mol_type = other DNA
cccgtggatctagatactcc

SEQ ID NO: 28616 - DNA, 20 bp, synthetic construct
  source 1..20: mol_type = other DNA
aattcctttatagacgtcaa

SEQ ID NO: 28617 - DNA, 20 bp, synthetic construct
  source 1..20: mol_type = other DNA
tggcaaaatctagattcttg

SEQ ID NO: 28618 - DNA, 20 bp, synthetic construct
  source 1..20: mol_type = other DNA
cgggtggatctagaccggcg

SEQ ID NO: 28619 - DNA, 20 bp, synthetic construct
  source 1..20: mol_type = other DNA
gccgtgtccctctcaccggc

SEQ ID NO: 28620 - DNA, 20 bp, synthetic construct
  source 1..20: mol_type = other DNA
gaatcgagaatctccacgga

SEQ ID NO: 28621 - DNA, 20 bp, synthetic construct
  source 1..20: mol_type = other DNA
cgggtgtccctctcccggcg

SEQ ID NO: 28622 - DNA, 20 bp, synthetic construct
  source 1..20: mol_type = other DNA
aattcctttatctccgtcaa

SEQ ID NO: 28623 - DNA, 20 bp, synthetic construct
  source 1..20: mol_type = other DNA
cgtaagtccctctccacgga

SEQ ID NO: 28624 - DNA, 20 bp, synthetic construct
  source 1..20: mol_type = other DNA
cgtaagtccctctcttcttg

SEQ ID NO: 28625 - DNA, 20 bp, synthetic construct
  source 1..20: mol_type = other DNA
cccaagtccctctctactcc

SEQ ID NO: 28626 - DNA, 20 bp, synthetic construct
  source 1..20: mol_type = other DNA
tggcaaaccctctcttcttg

SEQ ID NO: 28627 - DNA, 20 bp, synthetic construct
  source 1..20: mol_type = other DNA
gccgtgagacaggaaccggc

SEQ ID NO: 28628 - DNA, 20 bp, synthetic construct
  source 1..20: mol_type = other DNA
tggcaaagacaggattcttg

SEQ ID NO: 28629 - DNA, 20 bp, synthetic construct
  source 1..20: mol_type = other DNA
catgagagacaggattaata

SEQ ID NO: 28630 - DNA, 20 bp, synthetic construct
  source 1..20: mol_type = other DNA
gccgttcaacagaaaccggc

SEQ ID NO: 28631 - DNA, 20 bp, synthetic construct
  source 1..20: mol_type = other DNA
aattcctttaagaacgtcaa

SEQ ID NO: 28632 - DNA, 20 bp, synthetic construct
  source 1..20: mol_type = other DNA
gtagttcaacagaaagcttt

SEQ ID NO: 28633 - DNA, 20 bp, synthetic construct
  source 1..20: mol_type = other DNA
gtagttcaacagaaccggcg

SEQ ID NO: 28634 - DNA, 20 bp, synthetic construct
  source 1..20: mol_type = other DNA
cccgttcaacagaatactcc

SEQ ID NO: 28635 - DNA, 20 bp, synthetic construct
  source 1..20: mol_type = other DNA
gaatcgagaaagaacacgga

SEQ ID NO: 28636 - DNA, 20 bp, synthetic construct
  source 1..20: mol_type = other DNA
cgggttcaacagaaccggcg

SEQ ID NO: 28637 - DNA, 20 bp, synthetic construct
  source 1..20: mol_type = other DNA
tggcaaatccaagtttcttg

SEQ ID NO: 28638 - DNA, 20 bp, synthetic construct
  source 1..20: mol_type = other DNA
ttaacattccaagtttatct

SEQ ID NO: 28639 - DNA, 20 bp, synthetic construct
  source 1..20: mol_type = other DNA
taaatcaggtacagaatttc

SEQ ID NO: 28640 - DNA, 20 bp, synthetic construct
  source 1..20: mol_type = other DNA
cgggtcaggtacagccggcg

SEQ ID NO: 28641 - DNA, 20 bp, synthetic construct
  source 1..20: mol_type = other DNA
aattcctttaacagcgtcaa

SEQ ID NO: 28642 - DNA, 20 bp, synthetic construct
  source 1..20: mol_type = other DNA
aacagacaccatggtgcatc

SEQ ID NO: 28643 - DNA, 20 bp, synthetic construct
  source 1..20: mol_type = other DNA
aattcctttaatagcgtcaa

SEQ ID NO: 28644 - DNA, 20 bp, synthetic construct
  source 1..20: mol_type = other DNA
ttgttaccatatagcgtcaa

SEQ ID NO: 28645 - DNA, 20 bp, synthetic construct
  source 1..20: mol_type = other DNA
gccgtccacatgaaaccggc

SEQ ID NO: 28646 - DNA, 20 bp, synthetic construct
  source 1..20: mol_type = other DNA
cgccgccacatgaaaaagaa

SEQ ID NO: 28647 - DNA, 20 bp, synthetic construct
  source 1..20: mol_type = other DNA
cgccgccacatgaacgtcaa

SEQ ID NO: 28648 - DNA, 20 bp, synthetic construct
  source 1..20: mol_type = other DNA
aattcctttatgaacgtcaa

SEQ ID NO: 28649 - DNA, 20 bp, synthetic construct
  source 1..20: mol_type = other DNA
gaatcgagaacgaacacgga

SEQ ID NO: 28650 - DNA, 20 bp, synthetic construct
  source 1..20: mol_type = other DNA
cgggtatggccgaaccggcg

SEQ ID NO: 28651 - DNA, 20 bp, synthetic construct
  source 1..20: mol_type = other DNA
tagggatggccgaacgtcaa

SEQ ID NO: 28652 - DNA, 20 bp, synthetic construct
  source 1..20: mol_type = other DNA
aattcctttacgaacgtcaa

SEQ ID NO: 28653 - DNA, 20 bp, synthetic construct
  source 1..20: mol_type = other DNA
tggcaaaggccgaattcttg

SEQ ID NO: 28654 - DNA, 20 bp, synthetic construct
  source 1..20: mol_type = other DNA
gaatcgagaacccccacgga

SEQ ID NO: 28655 - DNA, 20 bp, synthetic construct
  source 1..20: mol_type = other DNA
gccgtcccttccccaccggc

SEQ ID NO: 28656 - DNA, 20 bp, synthetic construct
  source 1..20: mol_type = other DNA
aattcctttacccccgtcaa

SEQ ID NO: 28657 - DNA, 20 bp, synthetic construct
  source 1..20: mol_type = other DNA
tcccgcccttccccccggcg

SEQ ID NO: 28658 - DNA, 20 bp, synthetic construct
  source 1..20: mol_type = other DNA
tcccgcccttccccttcccg

SEQ ID NO: 28659 - DNA, 20 bp, synthetic construct
  source 1..20: mol_type = other DNA
ccccgcccttcccctactcc

SEQ ID NO: 28660 - DNA, 20 bp, synthetic construct
  source 1..20: mol_type = other DNA
tggcaaacttccccttcttg

SEQ ID NO: 28661 - DNA, 20 bp, synthetic construct
  source 1..20: mol_type = other DNA
cgggtcccttccccccggcg

SEQ ID NO: 28662 - DNA, 20 bp, synthetic construct
  source 1..20: mol_type = other DNA
gaatcgagaataaccacgga

SEQ ID NO: 28663 - DNA, 20 bp, synthetic construct
  source 1..20: mol_type = other DNA
cggtgtatcttaaccgtcaa

SEQ ID NO: 28664 - DNA, 20 bp, synthetic construct
  source 1..20: mol_type = other DNA
cggtgtatcttaacttcttg

SEQ ID NO: 28665 - DNA, 20 bp, synthetic construct
  source 1..20: mol_type = other DNA
tggcaaatcttaacttcttg

SEQ ID NO: 28666 - DNA, 20 bp, synthetic construct
  source 1..20: mol_type = other DNA
gccgtgcgttgcgtaccggc

SEQ ID NO: 28667 - DNA, 20 bp, synthetic construct
  source 1..20: mol_type = other DNA
gaatcgagaagcgtcacgga

SEQ ID NO: 28668 - DNA, 20 bp, synthetic construct
  source 1..20: mol_type = other DNA
cgggtgcgttgcgtccggcg

SEQ ID NO: 28669 - DNA, 20 bp, synthetic construct
  source 1..20: mol_type = other DNA
aattcctttagcgtcgtcaa

SEQ ID NO: 28670 - DNA, 20 bp, synthetic construct
  source 1..20: mol_type = other DNA
gccgtgcgttgcgtcgtcaa

SEQ ID NO: 28671 - DNA, 20 bp, synthetic construct
  source 1..20: mol_type = other DNA
gccgtgcgttgcgttactcc

SEQ ID NO: 28672 - DNA, 20 bp, synthetic construct
  source 1..20: mol_type = other DNA
gccgtgcgttgcgttccaag

SEQ ID NO: 28673 - DNA, 20 bp, synthetic construct
  source 1..20: mol_type = other DNA
gccgtgaatttttaaccggc

SEQ ID NO: 28674 - DNA, 20 bp, synthetic construct
  source 1..20: mol_type = other DNA
aattcctttatttacgtcaa

SEQ ID NO: 28675 - DNA, 20 bp, synthetic construct
  source 1..20: mol_type = other DNA
gtggagaatttttaaagaag

SEQ ID NO: 28676 - DNA, 20 bp, synthetic construct
  source 1..20: mol_type = other DNA
gtggagaatttttaccggcg

SEQ ID NO: 28677 - DNA, 20 bp, synthetic construct
  source 1..20: mol_type = other DNA
tggcaaaatttttattcttg

SEQ ID NO: 28678 - DNA, 20 bp, synthetic construct
  source 1..20: mol_type = other DNA
gaatcgagaaccaacacgga

SEQ ID NO: 28679 - DNA, 20 bp, synthetic construct
  source 1..20: mol_type = other DNA
cgggtgctgaccaaccggcg

SEQ ID NO: 28680 - DNA, 20 bp, synthetic construct
  source 1..20: mol_type = other DNA
ccaaagctgaccaacgtcaa

SEQ ID NO: 28681 - DNA, 20 bp, synthetic construct
  source 1..20: mol_type = other DNA
cccaagctgaccaatactcc

SEQ ID NO: 28682 - DNA, 20 bp, synthetic construct
  source 1..20: mol_type = other DNA
tggcaaatgaccaattcttg

SEQ ID NO: 28683 - DNA, 20 bp, synthetic construct
  source 1..20: mol_type = other DNA
gctccactcctggtggtgcc

SEQ ID NO: 28684 - DNA, 20 bp, synthetic construct
  source 1..20: mol_type = other DNA
gacggtatctgatcgtcttc

SEQ ID NO: 28685 - DNA, 20 bp, synthetic construct
  source 1..20: mol_type = other DNA
tacagacaccatggtgcatc

SEQ ID NO: 28686 - DNA, 20 bp, synthetic construct
  source 1..20: mol_type = other DNA
gccgtacaccatggaccggc

SEQ ID NO: 28687 - DNA, 20 bp, synthetic construct
  source 1..20: mol_type = other DNA
gccgtacaccatggtgcatc

SEQ ID NO: 28688 - DNA, 20 bp, synthetic construct
  source 1..20: mol_type = other DNA
gaatcgagaaatggcacgga

SEQ ID NO: 28689 - DNA, 20 bp, synthetic construct
  source 1..20: mol_type = other DNA
gaatcgagaaatggtgcatc

SEQ ID NO: 28690 - DNA, 20 bp, synthetic construct
  source 1..20: mol_type = other DNA
agcgagcgaccaaaggaacc

SEQ ID NO: 28691 - DNA, 20 bp, synthetic construct
  source 1..20: mol_type = other DNA
gcgggtcaccatggtgcatc

SEQ ID NO: 28692 - DNA, 20 bp, synthetic construct
  source 1..20: mol_type = other DNA
cgggtacaccatggccggcg

SEQ ID NO: 28693 - DNA, 20 bp, synthetic construct
  source 1..20: mol_type = other DNA
cgggtacaccatggtgcatc

SEQ ID NO: 28694 - DNA, 20 bp, synthetic construct
  source 1..20: mol_type = other DNA
caattcctttatggtgcatc

SEQ ID NO: 28695 - DNA, 20 bp, synthetic construct
  source 1..20: mol_type = other DNA
aattcctttaatggcgtcaa

SEQ ID NO: 28696 - DNA, 20 bp, synthetic construct
  source 1..20: mol_type = other DNA
aattcctttaatggtgcatc

SEQ ID NO: 28697 - DNA, 20 bp, synthetic construct
  source 1..20: mol_type = other DNA
aacaaccggccgtgtgcatc

SEQ ID NO: 28698 - DNA, 20 bp, synthetic construct
  source 1..20: mol_type = other DNA
aacaagcgaccaaaggaacc

SEQ ID NO: 28699 - DNA, 20 bp, synthetic construct
  source 1..20: mol_type = other DNA
aacacacggaatcgagaatc

SEQ ID NO: 28700 - DNA, 20 bp, synthetic construct
  source 1..20: mol_type = other DNA
aacacactcctggtggtgcc

SEQ ID NO: 28701 - DNA, 20 bp, synthetic construct
  source 1..20: mol_type = other DNA
aacacgtgttgagtcaaatt

SEQ ID NO: 28702 - DNA, 20 bp, synthetic construct
  source 1..20: mol_type = other DNA
aacagaaccggccgtgcatc

SEQ ID NO: 28703 - DNA, 20 bp, synthetic construct
  source 1..20: mol_type = other DNA
aacagacaaccaaaggaacc

SEQ ID NO: 28704 - DNA, 20 bp, synthetic construct
  source 1..20: mol_type = other DNA
aacagacacaccatactccc

SEQ ID NO: 28705 - DNA, 20 bp, synthetic construct
  source 1..20: mol_type = other DNA
aacagacacacggaatcgag

SEQ ID NO: 28706 - DNA, 20 bp, synthetic construct
  source 1..20: mol_type = other DNA
aacagacaccaatcgtcttc

SEQ ID NO: 28707 - DNA, 20 bp, synthetic construct
  source 1..20: mol_type = other DNA
aacagacaccacacggaatc

SEQ ID NO: 28708 - DNA, 20 bp, synthetic construct
  source 1..20: mol_type = other DNA
aacagacaccacatactccc

SEQ ID NO: 28709 - DNA, 20 bp, synthetic construct
  source 1..20: mol_type = other DNA
aacagacaccaccggcgggt

SEQ ID NO: 28710 - DNA, 20 bp, synthetic construct
  source 1..20: mol_type = other DNA
aacagacaccaggtggtgcc

SEQ ID NO: 28711 - DNA, 20 bp, synthetic construct
  source 1..20: mol_type = other DNA
aacagacaccatgaccggcc

SEQ ID NO: 28712 - DNA, 20 bp, synthetic construct
  source 1..20: mol_type = other DNA
aacagacaccatgaggaacc

SEQ ID NO: 28713 - DNA, 20 bp, synthetic construct
  source 1..20: mol_type = other DNA
aacagacaccatgcgtcaat

SEQ ID NO: 28714 - DNA, 20 bp, synthetic construct
  source 1..20: mol_type = other DNA
aacagacaccatggaccggc

SEQ ID NO: 28715 - DNA, 20 bp, synthetic construct
  source 1..20: mol_type = other DNA
aacagacaccatggcacgga

SEQ ID NO: 28716 - DNA, 20 bp, synthetic construct
  source 1..20: mol_type = other DNA
aacagacaccatggccggcg

SEQ ID NO: 28717 - DNA, 20 bp, synthetic construct
  source 1..20: mol_type = other DNA
aacagacaccatggcgtcaa

SEQ ID NO: 28718 - DNA, 20 bp, synthetic construct
  source 1..20: mol_type = other DNA
aacagacaccatggggaacc

SEQ ID NO: 28719 - DNA, 20 bp, synthetic construct
  source 1..20: mol_type = other DNA
aacagacaccatggggtgcc

SEQ ID NO: 28720 - DNA, 20 bp, synthetic construct
  source 1..20: mol_type = other DNA
aacagacaccatggtaaatt

SEQ ID NO: 28721 - DNA, 20 bp, synthetic construct
  source 1..20: mol_type = other DNA
aacagacaccatggtactcc

SEQ ID NO: 28722 - DNA, 20 bp, synthetic construct
  source 1..20: mol_type = other DNA
aacagacaccatggtatcgc

SEQ ID NO: 28723 - DNA, 20 bp, synthetic construct
  source 1..20: mol_type = other DNA
aacagacaccatggtcacgg

SEQ ID NO: 28724 - DNA, 20 bp, synthetic construct
  source 1..20: mol_type = other DNA
aacagacaccatggtcgtca

SEQ ID NO: 28725 - DNA, 20 bp, synthetic construct
  source 1..20: mol_type = other DNA
aacagacaccatggtgcaca

SEQ ID NO: 28726 - DNA, 20 bp, synthetic construct
  source 1..20: mol_type = other DNA
aacagacaccatggtgcacg

SEQ ID NO: 28727 - DNA, 20 bp, synthetic construct
  source 1..20: mol_type = other DNA
aacagacaccatggtgcatt

SEQ ID NO: 28728 - DNA, 20 bp, synthetic construct
  source 1..20: mol_type = other DNA
aacagacaccatggtgcgcc

SEQ ID NO: 28729 - DNA, 20 bp, synthetic construct
  source 1..20: mol_type = other DNA
aacagacaccatggtgtgcc

SEQ ID NO: 28730 - DNA, 20 bp, synthetic construct
  source 1..20: mol_type = other DNA
aacagacaccatggtgttct

SEQ ID NO: 28731 - DNA, 20 bp, synthetic construct
  source 1..20: mol_type = other DNA
aacagacaccatggttcttg

SEQ ID NO: 28732 - DNA, 20 bp, synthetic construct
  source 1..20: mol_type = other DNA
aacagacaccatgtactccc

SEQ ID NO: 28733 - DNA, 20 bp, synthetic construct
  source 1..20: mol_type = other DNA
aacagacaccatgtcaaatt

SEQ ID NO: 28734 - DNA, 20 bp, synthetic construct
  source 1..20: mol_type = other DNA
aacagacaccatgtggtgcc

SEQ ID NO: 28735 - DNA, 20 bp, synthetic construct
  source 1..20: mol_type = other DNA
aacagacacgtcaattcctt

SEQ ID NO: 28736 - DNA, 20 bp, synthetic construct
  source 1..20: mol_type = other DNA
aacagacacttcttggcaaa

SEQ ID NO: 28737 - DNA, 20 bp, synthetic construct
  source 1..20: mol_type = other DNA
aacagacatactcccgcatc

SEQ ID NO: 28738 - DNA, 20 bp, synthetic construct
  source 1..20: mol_type = other DNA
aacagaccaaccatactccc

SEQ ID NO: 28739 - DNA, 20 bp, synthetic construct
  source 1..20: mol_type = other DNA
aacagaccggcgggtgcatc

SEQ ID NO: 28740 - DNA, 20 bp, synthetic construct
  source 1..20: mol_type = other DNA
aacagacgtcaattccttta

SEQ ID NO: 28741 - DNA, 20 bp, synthetic construct
  source 1..20: mol_type = other DNA
aacagacgttgagtcaaatt

SEQ ID NO: 28742 - DNA, 20 bp, synthetic construct
  source 1..20: mol_type = other DNA
aacagagcaaccatactccc

SEQ ID NO: 28743 - DNA, 20 bp, synthetic construct
  source 1..20: mol_type = other DNA
aacaggcgaccaaaggaacc

SEQ ID NO: 28744 - DNA, 20 bp, synthetic construct
  source 1..20: mol_type = other DNA
aacattcttggcaaagcatc

SEQ ID NO: 28745 - DNA, 20 bp, synthetic construct
  source 1..20: mol_type = other DNA
aacccgtgttgagtcaaatt

SEQ ID NO: 28746 - DNA, 20 bp, synthetic construct
  source 1..20: mol_type = other DNA
aacgagcgaccaaaggaacc

SEQ ID NO: 28747 - DNA, 20 bp, synthetic construct
  source 1..20: mol_type = other DNA
aacggtatctgatcgtcttc

SEQ ID NO: 28748 - DNA, 20 bp, synthetic construct
  source 1..20: mol_type = other DNA
acacggaatcgagaagcatc

SEQ ID NO: 28749 - DNA, 20 bp, synthetic construct
  source 1..20: mol_type = other DNA
acgtcaattcctttagcatc

SEQ ID NO: 28750 - DNA, 20 bp, synthetic construct
  source 1..20: mol_type = other DNA
agctttgcaaccatactccc

SEQ ID NO: 28751 - DNA, 20 bp, synthetic construct
  source 1..20: mol_type = other DNA
atactcccccatggtgcatc

SEQ ID NO: 28752 - DNA, 20 bp, synthetic construct
  source 1..20: mol_type = other DNA
atcccgtgttgagtcaaatt

SEQ ID NO: 28753 - DNA, 20 bp, synthetic construct
  source 1..20: mol_type = other DNA
ccggccgtccatggtgcatc

SEQ ID NO: 28754 - DNA, 20 bp, synthetic construct
  source 1..20: mol_type = other DNA
ttcttggcaaatggtgcatc

SEQ ID NO: 28755 - DNA, 20 bp, synthetic construct
  source 1..20: mol_type = other DNA
cggcgggtccatggtgcatc

SEQ ID NO: 28756 - DNA, 20 bp, synthetic construct
  source 1..20: mol_type = other DNA
gaattaaccagacaaatcgc

SEQ ID NO: 28757 - DNA, 20 bp, synthetic construct
  source 1..20: mol_type = other DNA
ttggcaaaccatggtgcatc

SEQ ID NO: 28758 - DNA, 20 bp, synthetic construct
  source 1..20: mol_type = other DNA
cccagacaccatggtactcc

SEQ ID NO: 28759 - DNA, 20 bp, synthetic construct
  source 1..20: mol_type = other DNA
cccagacaccatggtgcatc

SEQ ID NO: 28760 - DNA, 20 bp, synthetic construct
  source 1..20: mol_type = other DNA
tggcaaaaccatggtgcatc

SEQ ID NO: 28761 - DNA, 20 bp, synthetic construct
  source 1..20: mol_type = other DNA
tggcaaaaccatggttcttg

SEQ ID NO: 28762 - DNA, 20 bp, synthetic construct
  source 1..20: mol_type = other DNA
ggcaaacaccatggtgcatc

SEQ ID NO: 28763 - DNA, 20 bp, synthetic construct
  source 1..20: mol_type = other DNA
atcgagaaccatggtgcatc

SEQ ID NO: 28764 - DNA, 20 bp, synthetic construct
  source 1..20: mol_type = other DNA
ttcctttaccatggtgcatc

SEQ ID NO: 28765 - DNA, 20 bp, synthetic construct
  source 1..20: mol_type = other DNA
cacagacaccatggtgcatc

SEQ ID NO: 28766 - DNA, 20 bp, synthetic construct
  source 1..20: mol_type = other DNA
gccgtagtctggggaccggc

SEQ ID NO: 28767 - DNA, 20 bp, synthetic construct
  source 1..20: mol_type = other DNA
tcctcagtctgcggcacgga

SEQ ID NO: 28768 - DNA, 20 bp, synthetic construct
  source 1..20: mol_type = other DNA
tcctcagtctgcggcgtcaa

SEQ ID NO: 28769 - DNA, 20 bp, synthetic construct
  source 1..20: mol_type = other DNA
tcctcagtctgcggtactcc

SEQ ID NO: 28770 - DNA, 20 bp, synthetic construct
  source 1..20: mol_type = other DNA
tcctcagtctgcggtgggct

SEQ ID NO: 28771 - DNA, 20 bp, synthetic construct
  source 1..20: mol_type = other DNA
tcctcagtctgcggttcttg

SEQ ID NO: 28772 - DNA, 20 bp, synthetic construct
  source 1..20: mol_type = other DNA
ccctcagtctgcggtactcc

SEQ ID NO: 28773 - DNA, 20 bp, synthetic construct
  source 1..20: mol_type = other DNA
tggcaaatctgcggttcttg

SEQ ID NO: 28774 - DNA, 20 bp, synthetic construct
  source 1..20: mol_type = other DNA
cgggtggaagaaaaccggcg

SEQ ID NO: 28775 - DNA, 20 bp, synthetic construct
  source 1..20: mol_type = other DNA
aaaagggaagaaaatactcc

SEQ ID NO: 28776 - DNA, 20 bp, synthetic construct
  source 1..20: mol_type = other DNA
aaaagggaagaaaattcttg

SEQ ID NO: 28777 - DNA, 20 bp, synthetic construct
  source 1..20: mol_type = other DNA
gaatcgagaaaaaacacgga

SEQ ID NO: 28778 - DNA, 20 bp, synthetic construct
  source 1..20: mol_type = other DNA
tggcaaaaagaaaattcttg

SEQ ID NO: 28779 - DNA, 20 bp, synthetic construct
  source 1..20: mol_type = other DNA
gaatcgagaaaactcacgga

SEQ ID NO: 28780 - DNA, 20 bp, synthetic construct
  source 1..20: mol_type = other DNA
cgggtaatcaaactccggcg

SEQ ID NO: 28781 - DNA, 20 bp, synthetic construct
  source 1..20: mol_type = other DNA
aattcctttaaactcgtcaa

SEQ ID NO: 28782 - DNA, 20 bp, synthetic construct
  source 1..20: mol_type = other DNA
gccgtaatcaaactaccggc

SEQ ID NO: 28783 - DNA, 20 bp, synthetic construct
  source 1..20: mol_type = other DNA
agacaaatcaaactccggcg

SEQ ID NO: 28784 - DNA, 20 bp, synthetic construct
  source 1..20: mol_type = other DNA
agacaaatcaaactcgtcaa

SEQ ID NO: 28785 - DNA, 20 bp, synthetic construct
  source 1..20: mol_type = other DNA
agacaaatcaaacttactcc

SEQ ID NO: 28786 - DNA, 20 bp, synthetic construct
  source 1..20: mol_type = other DNA
tggcaaatcaaactttcttg

SEQ ID NO: 28787 - DNA, 20 bp, synthetic construct
  source 1..20: mol_type = other DNA
gaatcgagaaccctcacgga

SEQ ID NO: 28788 - DNA, 20 bp, synthetic construct
  source 1..20: mol_type = other DNA
cgggtcggttccctccggcg

SEQ ID NO: 28789 - DNA, 20 bp, synthetic construct
  source 1..20: mol_type = other DNA
gtaaccggttccctcacgga

SEQ ID NO: 28790 - DNA, 20 bp, synthetic construct
  source 1..20: mol_type = other DNA
cccaccggttcccttactcc

SEQ ID NO: 28791 - DNA, 20 bp, synthetic construct
  source 1..20: mol_type = other DNA
gccgtcggttccctaccggc

SEQ ID NO: 28792 - DNA, 20 bp, synthetic construct
  source 1..20: mol_type = other DNA
gaatcgagaattcccacgga

SEQ ID NO: 28793 - DNA, 20 bp, synthetic construct
  source 1..20: mol_type = other DNA
gccgtgctgcttccaccggc

SEQ ID NO: 28794 - DNA, 20 bp, synthetic construct
  source 1..20: mol_type = other DNA
gagcggctgcttcccgtcaa

SEQ ID NO: 28795 - DNA, 20 bp, synthetic construct
  source 1..20: mol_type = other DNA
gagcggctgcttcctactcc

SEQ ID NO: 28796 - DNA, 20 bp, synthetic construct
  source 1..20: mol_type = other DNA
ccccggctgcttcctactcc

SEQ ID NO: 28797 - DNA, 20 bp, synthetic construct
  source 1..20: mol_type = other DNA
tggcaaatgcttccttcttg

SEQ ID NO: 28798 - DNA, 20 bp, synthetic construct
  source 1..20: mol_type = other DNA
gccgtcggtccacgaccggc

SEQ ID NO: 28799 - DNA, 20 bp, synthetic construct
  source 1..20: mol_type = other DNA
acgtacggtccacgtactcc

SEQ ID NO: 28800 - DNA, 20 bp, synthetic construct
  source 1..20: mol_type = other DNA
ccctacggtccacgtactcc

SEQ ID NO: 28801 - DNA, 20 bp, synthetic construct
  source 1..20: mol_type = other DNA
tggcaaagtccacgttcttg

SEQ ID NO: 28802 - DNA, 20 bp, synthetic construct
  source 1..20: mol_type = other DNA
catcggcatgccgcaccggc

SEQ ID NO: 28803 - DNA, 20 bp, synthetic construct
  source 1..20: mol_type = other DNA
catcggcatgccgctactcc

SEQ ID NO: 28804 - DNA, 20 bp, synthetic construct
  source 1..20: mol_type = other DNA
cgggtgcatgccgcccggcg

SEQ ID NO: 28805 - DNA, 20 bp, synthetic construct
  source 1..20: mol_type = other DNA
aattcctttaccgccgtcaa

SEQ ID NO: 28806 - DNA, 20 bp, synthetic construct
  source 1..20: mol_type = other DNA
ccccggcatgccgctactcc

SEQ ID NO: 28807 - DNA, 20 bp, synthetic construct
  source 1..20: mol_type = other DNA
gccgtggcgggggaaccggc

SEQ ID NO: 28808 - DNA, 20 bp, synthetic construct
  source 1..20: mol_type = other DNA
gaatcgagaagggacacgga

SEQ ID NO: 28809 - DNA, 20 bp, synthetic construct
  source 1..20: mol_type = other DNA
cccacggcgggggatactcc

SEQ ID NO: 28810 - DNA, 20 bp, synthetic construct
  source 1..20: mol_type = other DNA
aaattaaccagacaaatcgc

SEQ ID NO: 28811 - DNA, 20 bp, synthetic construct
  source 1..20: mol_type = other DNA
actccactcctggtggtgcc

SEQ ID NO: 28812 - DNA, 20 bp, synthetic construct
  source 1..20: mol_type = other DNA
ataacggcaaccatactccc

SEQ ID NO: 28813 - DNA, 20 bp, synthetic construct
  source 1..20: mol_type = other DNA
ataacggcaccaaaggaacc

SEQ ID NO: 28814 - DNA, 20 bp, synthetic construct
  source 1..20: mol_type = other DNA
ataacggcgaccatactccc

SEQ ID NO: 28815 - DNA, 20 bp, synthetic construct
  source 1..20: mol_type = other DNA
ataacggcgggaaaggaacc

SEQ ID NO: 28816 - DNA, 20 bp, synthetic construct
  source 1..20: mol_type = other DNA
ataacggcgggacaaatcgc

SEQ ID NO: 28817 - DNA, 20 bp, synthetic construct
  source 1..20: mol_type = other DNA
ataacggcgggcatactccc

SEQ ID NO: 28818 - DNA, 20 bp, synthetic construct
  source 1..20: mol_type = other DNA
ataacggcggggaaggaacc

SEQ ID NO: 28819 - DNA, 20 bp, synthetic construct
  source 1..20: mol_type = other DNA
ataacggcggggcaaatcgc

SEQ ID NO: 28820 - DNA, 20 bp, synthetic construct
  source 1..20: mol_type = other DNA
ataacggcgggggaactccc

SEQ ID NO: 28821 - DNA, 20 bp, synthetic construct
  source 1..20: mol_type = other DNA
ataacggcgggggacaaatt

SEQ ID NO: 28822 - DNA, 20 bp, synthetic construct
  source 1..20: mol_type = other DNA
ataacggcgggggaccggcg

SEQ ID NO: 28823 - DNA, 20 bp, synthetic construct
  source 1..20: mol_type = other DNA
ataacggcgggggagatcgc

SEQ ID NO: 28824 - DNA, 20 bp, synthetic construct
  source 1..20: mol_type = other DNA
ataacggcgggggaggccgc

SEQ ID NO: 28825 - DNA, 20 bp, synthetic construct
  source 1..20: mol_type = other DNA
ataacggcgggggaggccgt

SEQ ID NO: 28826 - DNA, 20 bp, synthetic construct
  source 1..20: mol_type = other DNA
ataacggcgggggaggcgcc

SEQ ID NO: 28827 - DNA, 20 bp, synthetic construct
  source 1..20: mol_type = other DNA
ataacggcgggggaggcttc

SEQ ID NO: 28828 - DNA, 20 bp, synthetic construct
  source 1..20: mol_type = other DNA
ataacggcgggggtggtgcc

SEQ ID NO: 28829 - DNA, 20 bp, synthetic construct
  source 1..20: mol_type = other DNA
ataacggcgtgagtcaaatt

SEQ ID NO: 28830 - DNA, 20 bp, synthetic construct
  source 1..20: mol_type = other DNA
ataacgggaccaaaggaacc

SEQ ID NO: 28831 - DNA, 20 bp, synthetic construct
  source 1..20: mol_type = other DNA
ataacgtgttgagtcaaatt

SEQ ID NO: 28832 - DNA, 20 bp, synthetic construct
  source 1..20: mol_type = other DNA
ataactgcaaccatactccc

SEQ ID NO: 28833 - DNA, 20 bp, synthetic construct
  source 1..20: mol_type = other DNA
ataccactcctggtggtgcc

SEQ ID NO: 28834 - DNA, 20 bp, synthetic construct
  source 1..20: mol_type = other DNA
ataccgtgttgagtcaaatt

SEQ ID NO: 28835 - DNA, 20 bp, synthetic construct
  source 1..20: mol_type = other DNA
atagagcgaccaaaggaacc

SEQ ID NO: 28836 - DNA, 20 bp, synthetic construct
  source 1..20: mol_type = other DNA
atcgagcgaccaaaggaacc

SEQ ID NO: 28837 - DNA, 20 bp, synthetic construct
  source 1..20: mol_type = other DNA
aattcctttagggacgtcaa

SEQ ID NO: 28838 - DNA, 20 bp, synthetic construct
  source 1..20: mol_type = other DNA
ggctttgcaaccatactccc

SEQ ID NO: 28839 - DNA, 20 bp, synthetic construct
  source 1..20: mol_type = other DNA
gtcgagcgaccaaaggaacc

SEQ ID NO: 28840 - DNA, 20 bp, synthetic construct
  source 1..20: mol_type = other DNA
gtctttgcaaccatactccc

SEQ ID NO: 28841 - DNA, 20 bp, synthetic construct
  source 1..20: mol_type = other DNA
gtgccactcctggtggtgcc

SEQ ID NO: 28842 - DNA, 20 bp, synthetic construct
  source 1..20: mol_type = other DNA
gtgccgtgttgagtcaaatt

SEQ ID NO: 28843 - DNA, 20 bp, synthetic construct
  source 1..20: mol_type = other DNA
gtgttaaccagacaaatcgc

SEQ ID NO: 28844 - DNA, 20 bp, synthetic construct
  source 1..20: mol_type = other DNA
gtgttaatctgatcgtcttc

SEQ ID NO: 28845 - DNA, 20 bp, synthetic construct
  source 1..20: mol_type = other DNA
gtgttacgaccaaaggaacc

SEQ ID NO: 28846 - DNA, 20 bp, synthetic construct
  source 1..20: mol_type = other DNA
gtgttagcaaccatactccc

SEQ ID NO: 28847 - DNA, 20 bp, synthetic construct
  source 1..20: mol_type = other DNA
gtgttagtcagacaaatcgc

SEQ ID NO: 28848 - DNA, 20 bp, synthetic construct
  source 1..20: mol_type = other DNA
gtgttagtcctggtggtgcc

SEQ ID NO: 28849 - DNA, 20 bp, synthetic construct
  source 1..20: mol_type = other DNA
gtgttagttagacaaatcgc

SEQ ID NO: 28850 - DNA, 20 bp, synthetic construct
  source 1..20: mol_type = other DNA
gtgttagttgcaaaggaacc

SEQ ID NO: 28851 - DNA, 20 bp, synthetic construct
  source 1..20: mol_type = other DNA
gtgttagttggacaaatcgc

SEQ ID NO: 28852 - DNA, 20 bp, synthetic construct
  source 1..20: mol_type = other DNA
gtgttagttgtgatactccc

SEQ ID NO: 28853 - DNA, 20 bp, synthetic construct
  source 1..20: mol_type = other DNA
gtgttagttgtggtggtgcc

SEQ ID NO: 28854 - DNA, 20 bp, synthetic construct
  source 1..20: mol_type = other DNA
gtgttagttgtgtaggaacc

SEQ ID NO: 28855 - DNA, 20 bp, synthetic construct
  source 1..20: mol_type = other DNA
gtgttagttgtgtcgtcttc

SEQ ID NO: 28856 - DNA, 20 bp, synthetic construct
  source 1..20: mol_type = other DNA
gtgttagttgtgttaatcgc

SEQ ID NO: 28857 - DNA, 20 bp, synthetic construct
  source 1..20: mol_type = other DNA
gtgttagttgtgttaccggc

SEQ ID NO: 28858 - DNA, 20 bp, synthetic construct
  source 1..20: mol_type = other DNA
gtgttagttgtgttagaacc

SEQ ID NO: 28859 - DNA, 20 bp, synthetic construct
  source 1..20: mol_type = other DNA
gtgttagttgtgttagtatt

SEQ ID NO: 28860 - DNA, 20 bp, synthetic construct
  source 1..20: mol_type = other DNA
gtgttagttgtgttagtccc

SEQ ID NO: 28861 - DNA, 20 bp, synthetic construct
  source 1..20: mol_type = other DNA
gtgttagttgtgttagtgcc

SEQ ID NO: 28862 - DNA, 20 bp, synthetic construct
  source 1..20: mol_type = other DNA
gtgttagttgtgttagttcc

SEQ ID NO: 28863 - DNA, 20 bp, synthetic construct
  source 1..20: mol_type = other DNA
gtgttagttgtgttagttgc

SEQ ID NO: 28864 - DNA, 20 bp, synthetic construct
  source 1..20: mol_type = other DNA
gtgttagttgtgttagttgt

SEQ ID NO: 28865 - DNA, 20 bp, synthetic construct
  source 1..20: mol_type = other DNA
gtgttagttgtgttatcttc

SEQ ID NO: 28866 - DNA, 20 bp, synthetic construct
  source 1..20: mol_type = other DNA
gtgttagttgtgttcaaatt

SEQ ID NO: 28867 - DNA, 20 bp, synthetic construct
  source 1..20: mol_type = other DNA
gtgttagttgtgttccggcg

SEQ ID NO: 28868 - DNA, 20 bp, synthetic construct
  source 1..20: mol_type = other DNA
gtgttagttgtgttggtgcc

SEQ ID NO: 28869 - DNA, 20 bp, synthetic construct
  source 1..20: mol_type = other DNA
gtgttagtttgatcgtcttc

SEQ ID NO: 28870 - DNA, 20 bp, synthetic construct
  source 1..20: mol_type = other DNA
gtgtttatctgatcgtcttc

SEQ ID NO: 28871 - DNA, 20 bp, synthetic construct
  source 1..20: mol_type = other DNA
gaatcgagaatgttcacgga

SEQ ID NO: 28872 - DNA, 20 bp, synthetic construct
  source 1..20: mol_type = other DNA
cccttagttgtgtttactcc

SEQ ID NO: 28873 - DNA, 20 bp, synthetic construct
  source 1..20: mol_type = other DNA
aattcctttatgttcgtcaa

SEQ ID NO: 28874 - DNA, 20 bp, synthetic construct
  source 1..20: mol_type = other DNA
gacatttctgacatttctga

SEQ ID NO: 28875 - DNA, 20 bp, synthetic construct
  source 1..20: mol_type = other DNA
cactatctgctagaccggcg

SEQ ID NO: 28876 - DNA, 20 bp, synthetic construct
  source 1..20: mol_type = other DNA
gaatcgagaatagacacgga

SEQ ID NO: 28877 - DNA, 20 bp, synthetic construct
  source 1..20: mol_type = other DNA
gccgttgctgtggaaccggc

SEQ ID NO: 28878 - DNA, 20 bp, synthetic construct
  source 1..20: mol_type = other DNA
gaatcgagaatggacacgga

SEQ ID NO: 28879 - DNA, 20 bp, synthetic construct
  source 1..20: mol_type = other DNA
cgggttgctgtggaccggcg

SEQ ID NO: 28880 - DNA, 20 bp, synthetic construct
  source 1..20: mol_type = other DNA
ccaagtgctgtggacgtcaa

SEQ ID NO: 28881 - DNA, 20 bp, synthetic construct
  source 1..20: mol_type = other DNA
ccaagtgctgtggactggcc

SEQ ID NO: 28882 - DNA, 20 bp, synthetic construct
  source 1..20: mol_type = other DNA
ccaagtgctgtggattcttg

SEQ ID NO: 28883 - DNA, 20 bp, synthetic construct
  source 1..20: mol_type = other DNA
gccgtttctgacataccggc

SEQ ID NO: 28884 - DNA, 20 bp, synthetic construct
  source 1..20: mol_type = other DNA
gaatcgagaaacatcacgga

SEQ ID NO: 28885 - DNA, 20 bp, synthetic construct
  source 1..20: mol_type = other DNA
gaatcgagaaacatttctga

SEQ ID NO: 28886 - DNA, 20 bp, synthetic construct
  source 1..20: mol_type = other DNA
gacatttctgacatcacgga

SEQ ID NO: 28887 - DNA, 20 bp, synthetic construct
  source 1..20: mol_type = other DNA
cgggtttctgacatccggcg

SEQ ID NO: 28888 - DNA, 20 bp, synthetic construct
  source 1..20: mol_type = other DNA
aattcctttaacatcgtcaa

SEQ ID NO: 28889 - DNA, 20 bp, synthetic construct
  source 1..20: mol_type = other DNA
aattcctttaacatttctga

SEQ ID NO: 28890 - DNA, 20 bp, synthetic construct
  source 1..20: mol_type = other DNA
gacatttctgacatcgtcaa

SEQ ID NO: 28891 - DNA, 20 bp, synthetic construct
  source 1..20: mol_type = other DNA
cccatttctgacattactcc

SEQ ID NO: 28892 - DNA, 20 bp, synthetic construct
  source 1..20: mol_type = other DNA
aacatttctgacatttctga

SEQ ID NO: 28893 - DNA, 20 bp, synthetic construct
  source 1..20: mol_type = other DNA
agaatttctgacatttctga

SEQ ID NO: 28894 - DNA, 20 bp, synthetic construct
  source 1..20: mol_type = other DNA
tttatttctgacatttctga

SEQ ID NO: 28895 - DNA, 20 bp, synthetic construct
  source 1..20: mol_type = other DNA
ccgttttctgacatttctga

SEQ ID NO: 28896 - DNA, 20 bp, synthetic construct
  source 1..20: mol_type = other DNA
gggttttctgacatttctga

SEQ ID NO: 28897 - DNA, 20 bp, synthetic construct
  source 1..20: mol_type = other DNA
gccgtttctgacatttctga

SEQ ID NO: 28898 - DNA, 20 bp, synthetic construct
  source 1..20: mol_type = other DNA
cgggtttctgacatttctga

SEQ ID NO: 28899 - DNA, 20 bp, synthetic construct
  source 1..20: mol_type = other DNA
ggccgttctgacatttctga

SEQ ID NO: 28900 - DNA, 20 bp, synthetic construct
  source 1..20: mol_type = other DNA
cccatttctgacatttctga

SEQ ID NO: 28901 - DNA, 20 bp, synthetic construct
  source 1..20: mol_type = other DNA
gcgggttctgacatttctga

SEQ ID NO: 28902 - DNA, 20 bp, synthetic construct
  source 1..20: mol_type = other DNA
caattcctttacatttctga

SEQ ID NO: 28903 - DNA, 20 bp, synthetic construct
  source 1..20: mol_type = other DNA
ggcaaatctgacatttctga

SEQ ID NO: 28904 - DNA, 20 bp, synthetic construct
  source 1..20: mol_type = other DNA
ccggccgttgacatttctga

SEQ ID NO: 28905 - DNA, 20 bp, synthetic construct
  source 1..20: mol_type = other DNA
cggcgggttgacatttctga

SEQ ID NO: 28906 - DNA, 20 bp, synthetic construct
  source 1..20: mol_type = other DNA
gacaaccggccgttttctga

SEQ ID NO: 28907 - DNA, 20 bp, synthetic construct
  source 1..20: mol_type = other DNA
gacacgtcaattcctttaga

SEQ ID NO: 28908 - DNA, 20 bp, synthetic construct
  source 1..20: mol_type = other DNA
gacatactcctggtggtgcc

SEQ ID NO: 28909 - DNA, 20 bp, synthetic construct
  source 1..20: mol_type = other DNA
gacatgcgaccaaaggaacc

SEQ ID NO: 28910 - DNA, 20 bp, synthetic construct
  source 1..20: mol_type = other DNA
gacattaccagacaaatcgc

SEQ ID NO: 28911 - DNA, 20 bp, synthetic construct
  source 1..20: mol_type = other DNA
gacattaccggccgttctga

SEQ ID NO: 28912 - DNA, 20 bp, synthetic construct
  source 1..20: mol_type = other DNA
gacattcacggaatcgagaa

SEQ ID NO: 28913 - DNA, 20 bp, synthetic construct
  source 1..20: mol_type = other DNA
gacattccggcgggttctga

SEQ ID NO: 28914 - DNA, 20 bp, synthetic construct
  source 1..20: mol_type = other DNA
gacattcgtcaattccttta

SEQ ID NO: 28915 - DNA, 20 bp, synthetic construct
  source 1..20: mol_type = other DNA
gacattcttggcaaatctga

SEQ ID NO: 28916 - DNA, 20 bp, synthetic construct
  source 1..20: mol_type = other DNA
gacatttactccctttctga

SEQ ID NO: 28917 - DNA, 20 bp, synthetic construct
  source 1..20: mol_type = other DNA
gacatttccgtcaattcctt

SEQ ID NO: 28918 - DNA, 20 bp, synthetic construct
  source 1..20: mol_type = other DNA
gacatttctagacaaatcgc

SEQ ID NO: 28919 - DNA, 20 bp, synthetic construct
  source 1..20: mol_type = other DNA
gacatttctccaaaggaacc

SEQ ID NO: 28920 - DNA, 20 bp, synthetic construct
  source 1..20: mol_type = other DNA
gacatttctccggcgggtga

SEQ ID NO: 28921 - DNA, 20 bp, synthetic construct
  source 1..20: mol_type = other DNA
gacatttctgaaccggccgt

SEQ ID NO: 28922 - DNA, 20 bp, synthetic construct
  source 1..20: mol_type = other DNA
gacatttctgaagtcaaatt

SEQ ID NO: 28923 - DNA, 20 bp, synthetic construct
  source 1..20: mol_type = other DNA
gacatttctgacaaccggcc

SEQ ID NO: 28924 - DNA, 20 bp, synthetic construct
  source 1..20: mol_type = other DNA
gacatttctgacacacggaa

SEQ ID NO: 28925 - DNA, 20 bp, synthetic construct
  source 1..20: mol_type = other DNA
gacatttctgacaccggcgg

SEQ ID NO: 28926 - DNA, 20 bp, synthetic construct
  source 1..20: mol_type = other DNA
gacatttctgacacggaatc

SEQ ID NO: 28927 - DNA, 20 bp, synthetic construct
  source 1..20: mol_type = other DNA
gacatttctgacacgtcaat

SEQ ID NO: 28928 - DNA, 20 bp, synthetic construct
  source 1..20: mol_type = other DNA
gacatttctgacataccggc

SEQ ID NO: 28929 - DNA, 20 bp, synthetic construct
  source 1..20: mol_type = other DNA
gacatttctgacatactccc

SEQ ID NO: 28930 - DNA, 20 bp, synthetic construct
  source 1..20: mol_type = other DNA
gacatttctgacatccggcg

SEQ ID NO: 28931 - DNA, 20 bp, synthetic construct
  source 1..20: mol_type = other DNA
gacatttctgacattactcc

SEQ ID NO: 28932 - DNA, 20 bp, synthetic construct
  source 1..20: mol_type = other DNA
gacatttctgacattcacgg

SEQ ID NO: 28933 - DNA, 20 bp, synthetic construct
  source 1..20: mol_type = other DNA
gacatttctgacattctccc

SEQ ID NO: 28934 - DNA, 20 bp, synthetic construct
  source 1..20: mol_type = other DNA
gacatttctgacattgaacc

SEQ ID NO: 28935 - DNA, 20 bp, synthetic construct
  source 1..20: mol_type = other DNA
gacatttctgacatttaccg

SEQ ID NO: 28936 - DNA, 20 bp, synthetic construct
  source 1..20: mol_type = other DNA
gacatttctgacatttactc

SEQ ID NO: 28937 - DNA, 20 bp, synthetic construct
  source 1..20: mol_type = other DNA
gacatttctgacatttcacc

SEQ ID NO: 28938 - DNA, 20 bp, synthetic construct
  source 1..20: mol_type = other DNA
gacatttctgacatttcatt

SEQ ID NO: 28939 - DNA, 20 bp, synthetic construct
  source 1..20: mol_type = other DNA
gacatttctgacatttcgcc

SEQ ID NO: 28940 - DNA, 20 bp, synthetic construct
  source 1..20: mol_type = other DNA
gacatttctgacatttctcc

SEQ ID NO: 28941 - DNA, 20 bp, synthetic construct
  source 1..20: mol_type = other DNA
gacatttctgacatttctcg

SEQ ID NO: 28942 - DNA, 20 bp, synthetic construct
  source 1..20: mol_type = other DNA
gacatttctgacatttctgc

SEQ ID NO: 28943 - DNA, 20 bp, synthetic construct
  source 1..20: mol_type = other DNA
gacatttctgacatttcttc

SEQ ID NO: 28944 - DNA, 20 bp, synthetic construct
  source 1..20: mol_type = other DNA
gacatttctgacatttcttg

SEQ ID NO: 28945 - DNA, 20 bp, synthetic construct
  source 1..20: mol_type = other DNA
gacatttctgacatttcttt

SEQ ID NO: 28946 - DNA, 20 bp, synthetic construct
  source 1..20: mol_type = other DNA
gacatttctgacgtggtgcc

SEQ ID NO: 28947 - DNA, 20 bp, synthetic construct
  source 1..20: mol_type = other DNA
gacatttctgatactcccga

SEQ ID NO: 28948 - DNA, 20 bp, synthetic construct
  source 1..20: mol_type = other DNA
gacatttctgattcttggca

SEQ ID NO: 28949 - DNA, 20 bp, synthetic construct
  source 1..20: mol_type = other DNA
gacatttctgcaaaggaacc

SEQ ID NO: 28950 - DNA, 20 bp, synthetic construct
  source 1..20: mol_type = other DNA
gacatttctttcttggcaaa

SEQ ID NO: 28951 - DNA, 20 bp, synthetic construct
  source 1..20: mol_type = other DNA
gacatttgaccaaaggaacc

SEQ ID NO: 28952 - DNA, 20 bp, synthetic construct
  source 1..20: mol_type = other DNA
gacattttcctggtggtgcc

SEQ ID NO: 28953 - DNA, 20 bp, synthetic construct
  source 1..20: mol_type = other DNA
gacgagcgaccaaaggaacc

SEQ ID NO: 28954 - DNA, 20 bp, synthetic construct
  source 1..20: mol_type = other DNA
gatccactcctggtggtgcc

SEQ ID NO: 28955 - DNA, 20 bp, synthetic construct
  source 1..20: mol_type = other DNA
gcgtcaattcctttatctga

SEQ ID NO: 28956 - DNA, 20 bp, synthetic construct
  source 1..20: mol_type = other DNA
gtactccctgacatttctga

SEQ ID NO: 28957 - DNA, 20 bp, synthetic construct
  source 1..20: mol_type = other DNA
tggcaaactgacatttctga

SEQ ID NO: 28958 - DNA, 20 bp, synthetic construct
  source 1..20: mol_type = other DNA
tggcaaactgacatttcttg

SEQ ID NO: 28959 - DNA, 20 bp, synthetic construct
  source 1..20: mol_type = other DNA
ttggcaaatgacatttctga

SEQ ID NO: 28960 - DNA, 20 bp, synthetic construct
  source 1..20: mol_type = other DNA
atcgagaatgacatttctga

SEQ ID NO: 28961 - DNA, 20 bp, synthetic construct
  source 1..20: mol_type = other DNA
tacatttctgacatttctga

SEQ ID NO: 28962 - DNA, 20 bp, synthetic construct
  source 1..20: mol_type = other DNA
cacatttctgacatttctga

SEQ ID NO: 28963 - DNA, 20 bp, synthetic construct
  source 1..20: mol_type = other DNA
caaatttctgacatttctga

SEQ ID NO: 28964 - DNA, 20 bp, synthetic construct
  source 1..20: mol_type = other DNA
cgagaatctgacatttctga

SEQ ID NO: 28965 - DNA, 20 bp, synthetic construct
  source 1..20: mol_type = other DNA
cctttatctgacatttctga

SEQ ID NO: 28966 - DNA, 20 bp, synthetic construct
  source 1..20: mol_type = other DNA
gaatcgagaaggaacacgga

SEQ ID NO: 28967 - DNA, 20 bp, synthetic construct
  source 1..20: mol_type = other DNA
ccaaatccctggaacacgga

SEQ ID NO: 28968 - DNA, 20 bp, synthetic construct
  source 1..20: mol_type = other DNA
ccaaatccctggaaccggcg

SEQ ID NO: 28969 - DNA, 20 bp, synthetic construct
  source 1..20: mol_type = other DNA
ccaaatccctggaaggagtg

SEQ ID NO: 28970 - DNA, 20 bp, synthetic construct
  source 1..20: mol_type = other DNA
cccaatccctggaatactcc

SEQ ID NO: 28971 - DNA, 20 bp, synthetic construct
  source 1..20: mol_type = other DNA
tggcaaacctggaattcttg

SEQ ID NO: 28972 - DNA, 20 bp, synthetic construct
  source 1..20: mol_type = other DNA
gccgtggcgcacctaccggc

SEQ ID NO: 28973 - DNA, 20 bp, synthetic construct
  source 1..20: mol_type = other DNA
aattcctttaacctcgtcaa

SEQ ID NO: 28974 - DNA, 20 bp, synthetic construct
  source 1..20: mol_type = other DNA
aatcaggcgcacctcgtcaa

SEQ ID NO: 28975 - DNA, 20 bp, synthetic construct
  source 1..20: mol_type = other DNA
aatcaggcgcaccttactcc

SEQ ID NO: 28976 - DNA, 20 bp, synthetic construct
  source 1..20: mol_type = other DNA
ccccaggcgcaccttactcc

SEQ ID NO: 28977 - DNA, 203 bp, synthetic construct; identical to SEQ ID NO: 231
  source 1..203: mol_type = other DNA

SEQ ID NO: 28978 - DNA, 203 bp, synthetic construct; identical to SEQ ID NO: 232
  source 1..203: mol_type = other DNA

SEQ ID NO: 28979 - DNA, 203 bp, synthetic construct; identical to SEQ ID NO: 241
  source 1..203: mol_type = other DNA

SEQ ID NO: 28980 - DNA, 203 bp, synthetic construct; identical to SEQ ID NO: 245
  source 1..203: mol_type = other DNA

SEQ ID NO: 28981 - DNA, 203 bp, synthetic construct; identical to SEQ ID NO: 254
  source 1..203: mol_type = other DNA

SEQ ID NO: 28982 - DNA, 203 bp, synthetic construct; identical to SEQ ID NO: 256
  source 1..203: mol_type = other DNA

SEQ ID NO: 28983 - DNA, 203 bp, synthetic construct; identical to SEQ ID NO: 259
  source 1..203: mol_type = other DNA

SEQ ID NO: 28984 - DNA, 203 bp, synthetic construct; identical to SEQ ID NO: 261
  source 1..203: mol_type = other DNA

SEQ ID NO: 28985 - DNA, 203 bp, synthetic construct; identical to SEQ ID NO: 265
  source 1..203: mol_type = other DNA

SEQ ID NO: 28986 - DNA, 203 bp, synthetic construct; identical to SEQ ID NO: 270
  source 1..203: mol_type = other DNA

SEQ ID NO: 28987 - DNA, 203 bp, synthetic construct; identical to SEQ ID NO: 271
  source 1..203: mol_type = other DNA

SEQ ID NO: 28988 - DNA, 203 bp, synthetic construct; identical to SEQ ID NO: 272
  source 1..203: mol_type = other DNA

SEQ ID NO: 28989 - DNA, 203 bp, synthetic construct; identical to SEQ ID NO: 273
  source 1..203: mol_type = other DNA

SEQ ID NO: 28990 - DNA, 203 bp, synthetic construct; identical to SEQ ID NO: 275
  source 1..203: mol_type = other DNA

SEQ ID NO: 28991 - DNA, 203 bp, synthetic construct; identical to SEQ ID NO: 276
  source 1..203: mol_type = other DNA

SEQ ID NO: 28992 - DNA, 203 bp, synthetic construct; identical to SEQ ID NO: 278
  source 1..203: mol_type = other DNA

SEQ ID NO: 28993 - DNA, 203 bp, synthetic construct; identical to SEQ ID NO: 290
  source 1..203: mol_type = other DNA

SEQ ID NO: 28994 - DNA, 203 bp, synthetic construct; identical to SEQ ID NO: 293
  source 1..203: mol_type = other DNA

SEQ ID NO: 28995 - DNA, 203 bp, synthetic construct; identical to SEQ ID NO: 295
  source 1..203: mol_type = other DNA

SEQ ID NO: 28996 - DNA, 203 bp, synthetic construct; identical to SEQ ID NO: 296
  source 1..203: mol_type = other DNA

SEQ ID NO: 28997 - DNA, 203 bp, synthetic construct; identical to SEQ ID NO: 297
  source 1..203: mol_type = other DNA

SEQ ID NO: 28998 - DNA, 203 bp, synthetic construct; identical to SEQ ID NO: 1
  source 1..203: mol_type = other DNA

SEQ ID NO: 28999 - DNA, 203 bp, synthetic construct; identical to SEQ ID NO: 300
  source 1..203: mol_type = other DNA

SEQ ID NO: 29000 - DNA, 203 bp, synthetic construct; identical to SEQ ID NO: 305
  source 1..203: mol_type = other DNA

SEQ ID NO: 29001 - DNA, 203 bp, synthetic construct; identical to SEQ ID NO: 307
  source 1..203: mol_type = other DNA

SEQ ID NO: 29002 - DNA, 203 bp, synthetic construct; identical to SEQ ID NO: 308
  source 1..203: mol_type = other DNA

SEQ ID NO: 29003 - DNA, 203 bp, synthetic construct; identical to SEQ ID NO: 314
  source 1..203: mol_type = other DNA

SEQ ID NO: 29004 - DNA, 203 bp, synthetic construct; identical to SEQ ID NO: 316
  source 1..203: mol_type = other DNA

SEQ ID NO: 29005 - DNA, 203 bp, synthetic construct; identical to SEQ ID NO: 317
  source 1..203: mol_type = other DNA

SEQ ID NO: 29006 - DNA, 203 bp, synthetic construct; identical to SEQ ID NO: 321
  source 1..203: mol_type = other DNA

SEQ ID NO: 29007 - DNA, 203 bp, synthetic construct; identical to SEQ ID NO: 329
  source 1..203: mol_type = other DNA

SEQ ID NO: 29008 - DNA, 203 bp, synthetic construct; identical to SEQ ID NO: 335
  source 1..203: mol_type = other DNA

SEQ ID NO: 29009 - DNA, 203 bp, synthetic construct; identical to SEQ ID NO: 339
  source 1..203: mol_type = other DNA

SEQ ID NO: 29010 - DNA, 203 bp, synthetic construct; identical to SEQ ID NO: 345
  source 1..203: mol_type = other DNA

SEQ ID NO: 29011 - DNA, 203 bp, synthetic construct; identical to SEQ ID NO: 348
  source 1..203: mol_type = other DNA

SEQ ID NO: 29012 - DNA, 203 bp, synthetic construct; identical to SEQ ID NO: 353
  source 1..203: mol_type = other DNA

SEQ ID NO: 29013 - DNA, 203 bp, synthetic construct; identical to SEQ ID NO: 358
  source 1..203: mol_type = other DNA

SEQ ID NO: 29014 - DNA, 203 bp, synthetic construct; identical to SEQ ID NO: 360
  source 1..203: mol_type = other DNA

SEQ ID NO: 29015 - DNA, 203 bp, synthetic construct; identical to SEQ ID NO: 363
  source 1..203: mol_type = other DNA

SEQ ID NO: 29016 - DNA, 203 bp, synthetic construct; identical to SEQ ID NO: 366
  source 1..203: mol_type = other DNA

SEQ ID NO: 29017 - DNA, 203 bp, synthetic construct; identical to SEQ ID NO: 377
  source 1..203: mol_type = other DNA

SEQ ID NO: 29018 - DNA, 203 bp, synthetic construct; identical to SEQ ID NO: 378
  source 1..203: mol_type = other DNA

SEQ ID NO: 29019 - DNA, 203 bp, synthetic construct; identical to SEQ ID NO: 383
  source 1..203: mol_type = other DNA

SEQ ID NO: 29020 - DNA, 203 bp, synthetic construct; identical to SEQ ID NO: 394
  source 1..203: mol_type = other DNA

SEQ ID NO: 29021 - DNA, 203 bp, synthetic construct; identical to SEQ ID NO: 404
  source 1..203: mol_type = other DNA

SEQ ID NO: 29022 - DNA, 203 bp, synthetic construct; identical to SEQ ID NO: 413
  source 1..203: mol_type = other DNA

SEQ ID NO: 29023 - DNA, 203 bp, synthetic construct; identical to SEQ ID NO: 416
  source 1..203: mol_type = other DNA

SEQ ID NO: 29024 - DNA, 203 bp, synthetic construct; identical to SEQ ID NO: 417
  source 1..203: mol_type = other DNA

SEQ ID NO: 29025 - DNA, 203 bp, synthetic construct; identical to SEQ ID NO: 421
  source 1..203: mol_type = other DNA

SEQ ID NO: 29026 - DNA, 203 bp, synthetic construct; identical to SEQ ID NO: 424
  source 1..203: mol_type = other DNA

SEQ ID NO: 29027 - DNA, 203 bp, synthetic construct; identical to SEQ ID NO: 429
  source 1..203: mol_type = other DNA

SEQ ID NO: 29028 - DNA, 203 bp, synthetic construct; identical to SEQ ID NO: 434
  source 1..203: mol_type = other DNA

SEQ ID NO: 29029 - DNA, 203 bp, synthetic construct; identical to SEQ ID NO: 441
  source 1..203: mol_type = other DNA

SEQ ID NO: 29030 - DNA, 203 bp, synthetic construct; identical to SEQ ID NO: 443
  source 1..203: mol_type = other DNA

SEQ ID NO: 29031 - DNA, 203 bp, synthetic construct; identical to SEQ ID NO: 448
  source 1..203: mol_type = other DNA

SEQ ID NO: 29032 - DNA, 203 bp, synthetic construct; identical to SEQ ID NO: 450
  source 1..203: mol_type = other DNA

SEQ ID NO: 29033 - DNA, 203 bp, synthetic construct; identical to SEQ ID NO: 454
  source 1..203: mol_type = other DNA

SEQ ID NO: 29034 - DNA, 203 bp, synthetic construct; identical to SEQ ID NO: 464
  source 1..203: mol_type = other DNA

SEQ ID NO: 29035 - DNA, 203 bp, synthetic construct; identical to SEQ ID NO: 466
  source 1..203: mol_type = other DNA

SEQ ID NO: 29036 - DNA, 203 bp, synthetic construct; identical to SEQ ID NO: 468
  source 1..203: mol_type = other DNA

SEQ ID NO: 29037 - DNA, 203 bp, synthetic construct; identical to SEQ ID NO: 477
  source 1..203: mol_type = other DNA

SEQ ID NO: 29038 - DNA, 203 bp, synthetic construct; identical to SEQ ID NO: 482
  source 1..203: mol_type = other DNA

SEQ ID NO: 29039 - DNA, 203 bp, synthetic construct; identical to SEQ ID NO: 485
  source 1..203: mol_type = other DNA

SEQ ID NO: 29040 - DNA, 203 bp, synthetic construct; identical to SEQ ID NO: 486
  source 1..203: mol_type = other DNA

SEQ ID NO: 29041 - DNA, 203 bp, synthetic construct; identical to SEQ ID NO: 487
  source 1..203: mol_type = other DNA

SEQ ID NO: 29042 - DNA, 203 bp, synthetic construct; identical to SEQ ID NO: 492
  source 1..203: mol_type = other DNA

SEQ ID NO: 29043 - DNA, 203 bp, synthetic construct; identical to SEQ ID NO: 502
  source 1..203: mol_type = other DNA

SEQ ID NO: 29044 - DNA, 203 bp, synthetic construct; identical to SEQ ID NO: 507
  source 1..203: mol_type = other DNA

SEQ ID NO: 29045 - DNA, 203 bp, synthetic construct; identical to SEQ ID NO: 508
  source 1..203: mol_type = other DNA

SEQ ID NO: 29046 - DNA, 203 bp, synthetic construct; identical to SEQ ID NO: 516
  source 1..203: mol_type = other DNA

SEQ ID NO: 29047 - DNA, 203 bp, synthetic construct; identical to SEQ ID NO: 521
  source 1..203: mol_type = other DNA

SEQ ID NO: 29048 - DNA, 203 bp, synthetic construct; identical to SEQ ID NO: 522
  source 1..203: mol_type = other DNA

SEQ ID NO: 29049 - DNA, 203 bp, synthetic construct; identical to SEQ ID NO: 527
  source 1..203: mol_type = other DNA

SEQ ID NO: 29050 - DNA, 203 bp, synthetic construct; identical to SEQ ID NO: 528
  source 1..203: mol_type = other DNA

SEQ ID NO: 29051 - DNA, 203 bp, synthetic construct; identical to SEQ ID NO: 533
  source 1..203: mol_type = other DNA

SEQ ID NO: 29052 - DNA, 203 bp, synthetic construct; identical to SEQ ID NO: 541
  source 1..203: mol_type = other DNA

SEQ ID NO: 29053 - DNA, 203 bp, synthetic construct; identical to SEQ ID NO: 545
  source 1..203: mol_type = other DNA

SEQ ID NO: 29054 - DNA, 203 bp, synthetic construct; identical to SEQ ID NO: 549
  source 1..203: mol_type = other DNA

SEQ ID NO: 29055 - DNA, 203 bp, synthetic construct; identical to SEQ ID NO: 550
  source 1..203: mol_type = other DNA

SEQ ID NO: 29056 - DNA, 203 bp, synthetic construct; identical to SEQ ID NO: 553
  source 1..203: mol_type = other DNA

SEQ ID NO: 29057 - DNA, 203 bp, synthetic construct; identical to SEQ ID NO: 559
  source 1..203: mol_type = other DNA

SEQ ID NO: 29058 - DNA, 203 bp, synthetic construct; identical to SEQ ID NO: 560
  source 1..203: mol_type = other DNA

SEQ ID NO: 29059 - DNA, 203 bp, synthetic construct; identical to SEQ ID NO: 561
  source 1..203: mol_type = other DNA

SEQ ID NO: 29060 - DNA, 203 bp, synthetic construct; identical to SEQ ID NO: 572
  source 1..203: mol_type = other DNA

SEQ ID NO: 29061 - DNA, 203 bp, synthetic construct; identical to SEQ ID NO: 575
  source 1..203: mol_type = other DNA

SEQ ID NO: 29062 - DNA, 203 bp, synthetic construct; identical to SEQ ID NO: 576
  source 1..203: mol_type = other DNA

SEQ ID NO: 29063 - DNA, 203 bp, synthetic construct; identical to SEQ ID NO: 581
  source 1..203: mol_type = other DNA

SEQ ID NO: 29064 - DNA, 203 bp, synthetic construct; identical to SEQ ID NO: 582
  source 1..203: mol_type = other DNA

SEQ ID NO: 29065 - DNA, 203 bp, synthetic construct; identical to SEQ ID NO: 585
  source 1..203: mol_type = other DNA

SEQ ID NO: 29066 - DNA, 203 bp, synthetic construct; identical to SEQ ID NO: 587
  source 1..203: mol_type = other DNA

SEQ ID NO: 29067 - DNA, 203 bp, synthetic construct; identical to SEQ ID NO: 589
  source 1..203: mol_type = other DNA

SEQ ID NO: 29068 - DNA, 203 bp, synthetic construct; identical to SEQ ID NO: 590
  source 1..203: mol_type = other DNA

SEQ ID NO: 29069 - DNA, 203 bp, synthetic construct; identical to SEQ ID NO: 594
  source 1..203: mol_type = other DNA

SEQ ID NO: 29070 - DNA, 203 bp, synthetic construct; identical to SEQ ID NO: 596
  source 1..203: mol_type = other DNA

SEQ ID NO: 29071 - DNA, 203 bp, synthetic construct; identical to SEQ ID NO: 598
  source 1..203: mol_type = other DNA

SEQ ID NO: 29072 - DNA, 203 bp, synthetic construct; identical to SEQ ID NO: 606
  source 1..203: mol_type = other DNA

SEQ ID NO: 29073 - DNA, 203 bp, synthetic construct; identical to SEQ ID NO: 617
  source 1..203: mol_type = other DNA

SEQ ID NO: 29074 - DNA, 203 bp, synthetic construct; identical to SEQ ID NO: 619
  source 1..203: mol_type = other DNA

SEQ ID NO: 29075 - DNA, 203 bp, synthetic construct; identical to SEQ ID NO: 624
  source 1..203: mol_type = other DNA

SEQ ID NO: 29076 - DNA, 203 bp, synthetic construct; identical to SEQ ID NO: 630
  source 1..203: mol_type = other DNA

SEQ ID NO: 29077 - DNA, 203 bp, synthetic construct; identical to SEQ ID NO: 633
  source 1..203: mol_type = other DNA

SEQ ID NO: 29078 - DNA, 203 bp, synthetic construct; identical to SEQ ID NO: 634
  source 1..203: mol_type = other DNA

SEQ ID NO: 29079 - DNA, 203 bp, synthetic construct; identical to SEQ ID NO: 640
  source 1..203: mol_type = other DNA

SEQ ID NO: 29080 - DNA, 203 bp, synthetic construct; identical to SEQ ID NO: 641
  source 1..203: mol_type = other DNA

SEQ ID NO: 29081 - DNA, 203 bp, synthetic construct; identical to SEQ ID NO: 655
  source 1..203: mol_type = other DNA

SEQ ID NO: 29082 - DNA, 203 bp, synthetic construct; identical to SEQ ID NO: 657
  source 1..203: mol_type = other DNA

SEQ ID NO: 29083 - DNA, 203 bp, synthetic construct; identical to SEQ ID NO: 660
  source 1..203: mol_type = other DNA

SEQ ID NO: 29084 - DNA, 203 bp, synthetic construct; identical to SEQ ID NO: 664
  source 1..203: mol_type = other DNA

SEQ ID NO: 29085 - DNA, 203 bp, synthetic construct; identical to SEQ ID NO: 2
  source 1..203: mol_type = other DNA

SEQ ID NO: 29086 - DNA, 203 bp, synthetic construct; identical to SEQ ID NO: 668
  source 1..203: mol_type = other DNA

SEQ ID NO: 29087 - DNA, 203 bp, synthetic construct; identical to SEQ ID NO: 669
  source 1..203: mol_type = other DNA

SEQ ID NO: 29088 - DNA, 203 bp, synthetic construct; identical to SEQ ID NO: 697
  source 1..203: mol_type = other DNA

SEQ ID NO: 29089 - DNA, 203 bp, synthetic construct; identical to SEQ ID NO: 703
  source 1..203: mol_type = other DNA

SEQ ID NO: 29090 - DNA, 203 bp, synthetic construct; identical to SEQ ID NO: 704
  source 1..203: mol_type = other DNA

SEQ ID NO: 29091 - DNA, 203 bp, synthetic construct; identical to SEQ ID NO: 710
  source 1..203: mol_type = other DNA

SEQ ID NO: 29092 - DNA, 203 bp, synthetic construct; identical to SEQ ID NO: 711
  source 1..203: mol_type = other DNA

SEQ ID NO: 29093 - DNA, 203 bp, synthetic construct; identical to SEQ ID NO: 713
  source 1..203: mol_type = other DNA

SEQ ID NO: 29094 - DNA, 203 bp, synthetic construct; identical to SEQ ID NO: 714
  source 1..203: mol_type = other DNA

SEQ ID NO: 29095 - DNA, 203 bp, synthetic construct; identical to SEQ ID NO: 717
  source 1..203: mol_type = other DNA

SEQ ID NO: 29096 - DNA, 203 bp, synthetic construct; identical to SEQ ID NO: 726
  source 1..203: mol_type = other DNA

SEQ ID NO: 29097 - DNA, 203 bp, synthetic construct; identical to SEQ ID NO: 728
  source 1..203: mol_type = other DNA

SEQ ID NO: 29098 - DNA, 203 bp, synthetic construct; identical to SEQ ID NO: 732
  source 1..203: mol_type = other DNA

SEQ ID NO: 29099 - DNA, 203 bp, synthetic construct; identical to SEQ ID NO: 736
  source 1..203: mol_type = other DNA

SEQ ID NO: 29100 - DNA, 203 bp, synthetic construct; identical to SEQ ID NO: 744
  source 1..203: mol_type = other DNA

SEQ ID NO: 29101 - DNA, 203 bp, synthetic construct; identical to SEQ ID NO: 746
  source 1..203: mol_type = other DNA

SEQ ID NO: 29102 - DNA, 203 bp, synthetic construct; identical to SEQ ID NO: 749
  source 1..203: mol_type = other DNA

SEQ ID NO: 29103 - DNA, 203 bp, synthetic construct; identical to SEQ ID NO: 755
  source 1..203: mol_type = other DNA

SEQ ID NO: 29104 - DNA, 203 bp, synthetic construct; identical to SEQ ID NO: 756
  source 1..203: mol_type = other DNA

SEQ ID NO: 29105 - DNA, 203 bp, synthetic construct; identical to SEQ ID NO: 771
  source 1..203: mol_type = other DNA

SEQ ID NO: 29106 - DNA, 203 bp, synthetic construct; identical to SEQ ID NO: 772
  source 1..203: mol_type = other DNA

SEQ ID NO: 29107 - DNA, 203 bp, synthetic construct; identical to SEQ ID NO: 774
  source 1..203: mol_type = other DNA

SEQ ID NO: 29108 - DNA, 203 bp, synthetic construct; identical to SEQ ID NO: 783
  source 1..203: mol_type = other DNA

SEQ ID NO: 29109 - DNA, 203 bp, synthetic construct; identical to SEQ ID NO: 784
  source 1..203: mol_type = other DNA

SEQ ID NO: 29110 - DNA, 203 bp, synthetic construct; identical to SEQ ID NO: 786
  source 1..203: mol_type = other DNA

SEQ ID NO: 29111 - DNA, 203 bp, synthetic construct; identical to SEQ ID NO: 794
  source 1..203: mol_type = other DNA

SEQ ID NO: 29112 - DNA, 203 bp, synthetic construct; identical to SEQ ID NO: 798
  source 1..203: mol_type = other DNA

SEQ ID NO: 29113 - DNA, 203 bp, synthetic construct; identical to SEQ ID NO: 799
  source 1..203: mol_type = other DNA

SEQ ID NO: 29114 - DNA, 203 bp, synthetic construct; identical to SEQ ID NO: 815
  source 1..203: mol_type = other DNA

SEQ ID NO: 29115 - DNA, 203 bp, synthetic construct; identical to SEQ ID NO: 820
  source 1..203: mol_type = other DNA

SEQ ID NO: 29116 - DNA, 203 bp, synthetic construct; identical to SEQ ID NO: 822
  source 1..203: mol_type = other DNA

SEQ ID NO: 29117 - DNA, 203 bp, synthetic construct; identical to SEQ ID NO: 824
  source 1..203: mol_type = other DNA

SEQ ID NO: 29118 - DNA, 203 bp, synthetic construct; identical to SEQ ID NO: 833
  source 1..203: mol_type = other DNA

SEQ ID NO: 29119 - DNA, 203 bp, synthetic construct; identical to SEQ ID NO: 834
  source 1..203: mol_type = other DNA

SEQ ID NO: 29120 - DNA, 203 bp, synthetic construct; identical to SEQ ID NO: 835
  source 1..203: mol_type = other DNA

SEQ ID NO: 29121 - DNA, 203 bp, synthetic construct; identical to SEQ ID NO: 843
  source 1..203: mol_type = other DNA

SEQ ID NO: 29122 - DNA, 203 bp, synthetic construct; identical to SEQ ID NO: 844
  source 1..203: mol_type = other DNA

SEQ ID NO: 29123 - DNA, 203 bp, synthetic construct; identical to SEQ ID NO: 849
  source 1..203: mol_type = other DNA

SEQ ID NO: 29124 - DNA, 203 bp, synthetic construct; identical to SEQ ID NO: 856
  source 1..203: mol_type = other DNA

SEQ ID NO: 29125 - DNA, 203 bp, synthetic construct; identical to SEQ ID NO: 860
  source 1..203: mol_type = other DNA

SEQ ID NO: 29126 - DNA, 203 bp, synthetic construct; identical to SEQ ID NO: 861
  source 1..203: mol_type = other DNA

SEQ ID NO: 29127 - DNA, 203 bp, synthetic construct; identical to SEQ ID NO: 863
  source 1..203: mol_type = other DNA

SEQ ID NO: 29128 - DNA, 203 bp, synthetic construct; identical to SEQ ID NO: 865
  source 1..203: mol_type = other DNA

SEQ ID NO: 29129 - DNA, 203 bp, synthetic construct; identical to SEQ ID NO: 866
  source 1..203: mol_type = other DNA

SEQ ID NO: 29130 - DNA, 203 bp, synthetic construct; identical to SEQ ID NO: 882
  source 1..203: mol_type = other DNA

SEQ ID NO: 29131 - DNA, 203 bp, synthetic construct; identical to SEQ ID NO: 885
  source 1..203: mol_type = other DNA

SEQ ID NO: 29132 - DNA, 203 bp, synthetic construct; identical to SEQ ID NO: 886
  source 1..203: mol_type = other DNA

SEQ ID NO: 29133 - DNA, 203 bp, synthetic construct; identical to SEQ ID NO: 892
  source 1..203: mol_type = other DNA

SEQ ID NO: 29134 - DNA, 203 bp, synthetic construct; identical to SEQ ID NO: 893
  source 1..203: mol_type = other DNA

SEQ ID NO: 29135 - DNA, 203 bp, synthetic construct; identical to SEQ ID NO: 894
  source 1..203: mol_type = other DNA

SEQ ID NO: 29136 - DNA, 203 bp, synthetic construct; identical to SEQ ID NO: 910
  source 1..203: mol_type = other DNA

SEQ ID NO: 29137 - DNA, 203 bp, synthetic construct; identical to SEQ ID NO: 917
  source 1..203: mol_type = other DNA

SEQ ID NO: 29138 - DNA, 203 bp, synthetic construct; identical to SEQ ID NO: 924
  source 1..203: mol_type = other DNA

SEQ ID NO: 29139 - DNA, 203 bp, synthetic construct; identical to SEQ ID NO: 930
  source 1..203: mol_type = other DNA

SEQ ID NO: 29140 - DNA, 203 bp, synthetic construct; identical to SEQ ID NO: 931
  source 1..203: mol_type = other DNA

SEQ ID NO: 29141 - DNA, 203 bp, synthetic construct; identical to SEQ ID NO: 934
  source 1..203: mol_type = other DNA

SEQ ID NO: 29142 - DNA, 203 bp, synthetic construct; identical to SEQ ID NO: 939
  source 1..203: mol_type = other DNA

SEQ ID NO: 29143 - DNA, 203 bp, synthetic construct; identical to SEQ ID NO: 940
  source 1..203: mol_type = other DNA

SEQ ID NO: 29144 - DNA, 203 bp, synthetic construct; identical to SEQ ID NO: 942
  source 1..203: mol_type = other DNA

SEQ ID NO: 29145 - DNA, 203 bp, synthetic construct; identical to SEQ ID NO: 946
  source 1..203: mol_type = other DNA

SEQ ID NO: 29146 - DNA, 203 bp, synthetic construct; identical to SEQ ID NO: 948
  source 1..203: mol_type = other DNA

SEQ ID NO: 29147 - DNA, 203 bp, synthetic construct; identical to SEQ ID NO: 952
  source 1..203: mol_type = other DNA

SEQ ID NO: 29148 - DNA, 203 bp, synthetic construct; identical to SEQ ID NO: 956
  source 1..203: mol_type = other DNA

SEQ ID NO: 29149 - DNA, 203 bp, synthetic construct; identical to SEQ ID NO: 959
  source 1..203: mol_type = other DNA

SEQ ID NO: 29150 - DNA, 203 bp, synthetic construct; identical to SEQ ID NO: 979
  source 1..203: mol_type = other DNA

SEQ ID NO: 29151 - DNA, 203 bp, synthetic construct; identical to SEQ ID NO: 982
  source 1..203: mol_type = other DNA

SEQ ID NO: 29152 - DNA, 203 bp, synthetic construct; identical to SEQ ID NO: 984
  source 1..203: mol_type = other DNA

SEQ ID NO: 29153 - DNA, 203 bp, synthetic construct; identical to SEQ ID NO: 986
  source 1..203: mol_type = other DNA

SEQ ID NO: 29154 - DNA, 203 bp, synthetic construct; identical to SEQ ID NO: 987
  source 1..203: mol_type = other DNA

SEQ ID NO: 29155 - DNA, 203 bp, synthetic construct; identical to SEQ ID NO: 988
  source 1..203: mol_type = other DNA

SEQ ID NO: 29156 - DNA, 203 bp, synthetic construct; identical to SEQ ID NO: 990
  source 1..203: mol_type = other DNA

SEQ ID NO: 29157 - DNA, 203 bp, synthetic construct; identical to SEQ ID NO: 994
  source 1..203: mol_type = other DNA

SEQ ID NO: 29158 - DNA, 203 bp, synthetic construct; identical to SEQ ID NO: 1001
  source 1..203: mol_type = other DNA

SEQ ID NO: 29159 - DNA, 203 bp, synthetic construct; identical to SEQ ID NO: 1007
  source 1..203: mol_type = other DNA

SEQ ID NO: 29160 - DNA, 203 bp, synthetic construct; identical to SEQ ID NO: 1008
  source 1..203: mol_type = other DNA

SEQ ID NO: 29161 - DNA, 203 bp, synthetic construct; identical to SEQ ID NO: 1009
  source 1..203: mol_type = other DNA

SEQ ID NO: 29162 - DNA, 203 bp, synthetic construct; identical to SEQ ID NO: 1019
  source 1..203: mol_type = other DNA

SEQ ID NO: 29163 - DNA, 203 bp, synthetic construct; identical to SEQ ID NO: 1023
  source 1..203: mol_type = other DNA

SEQ ID NO: 29164 - DNA, 203 bp, synthetic construct; identical to SEQ ID NO: 1027
  source 1..203: mol_type = other DNA

SEQ ID NO: 29165 - DNA, 203 bp, synthetic construct; identical to SEQ ID NO: 1038
  source 1..203: mol_type = other DNA

SEQ ID NO: 29166 - DNA, 203 bp, synthetic construct; identical to SEQ ID NO: 1039
  source 1..203: mol_type = other DNA

SEQ ID NO: 29167 - DNA, 203 bp, synthetic construct; identical to SEQ ID NO: 1040
  source 1..203: mol_type = other DNA

SEQ ID NO: 29168 - DNA, 203 bp, synthetic construct; identical to SEQ ID NO: 1044
  source 1..203: mol_type = other DNA

SEQ ID NO: 29169 - DNA, 203 bp, synthetic construct; identical to SEQ ID NO: 1048
  source 1..203: mol_type = other DNA

SEQ ID NO: 29170 - DNA, 203 bp, synthetic construct; identical to SEQ ID NO: 1049
  source 1..203: mol_type = other DNA

SEQ ID NO: 29171 - DNA, 203 bp, synthetic construct; identical to SEQ ID NO: 1056
  source 1..203: mol_type = other DNA

SEQ ID NO: 29172 - DNA, 203 bp, synthetic construct; identical to SEQ ID NO: 1064
  source 1..203: mol_type = other DNA

SEQ ID NO: 29173 - DNA, 203 bp, synthetic construct; identical to SEQ ID NO: 1068
  source 1..203: mol_type = other DNA

SEQ ID NO: 29174 - DNA, 203 bp, synthetic construct; identical to SEQ ID NO: 1069
  source 1..203: mol_type = other DNA

SEQ ID NO: 29175 - DNA, 203 bp, synthetic construct; identical to SEQ ID NO: 1071
  source 1..203: mol_type = other DNA

SEQ ID NO: 29176 - DNA, 203 bp, synthetic construct; identical to SEQ ID NO: 1072
  source 1..203: mol_type = other DNA

SEQ ID NO: 29177 - DNA, 203 bp, synthetic construct; identical to SEQ ID NO: 1073
  source 1..203: mol_type = other DNA

SEQ ID NO: 29178 - DNA, 203 bp, synthetic construct; identical to SEQ ID NO: 1075
  source 1..203: mol_type = other DNA

SEQ ID NO: 29179 - DNA, 203 bp, synthetic construct; identical to SEQ ID NO: 1077
  source 1..203: mol_type = other DNA

SEQ ID NO: 29180 - DNA, 203 bp, synthetic construct; identical to SEQ ID NO: 1078
  source 1..203: mol_type = other DNA

SEQ ID NO: 29181 - DNA, 203 bp, synthetic construct; identical to SEQ ID NO: 1079
  source 1..203: mol_type = other DNA

SEQ ID NO: 29182 - DNA, 203 bp, synthetic construct; identical to SEQ ID NO: 1080
  source 1..203: mol_type = other DNA

SEQ ID NO: 29183 - DNA, 203 bp, synthetic construct; identical to SEQ ID NO: 1082
  source 1..203: mol_type = other DNA

SEQ ID NO: 29184 - DNA, 203 bp, synthetic construct; identical to SEQ ID NO: 1083
  source 1..203: mol_type = other DNA

SEQ ID NO: 29185 - DNA, 203 bp, synthetic construct; identical to SEQ ID NO: 1090
  source 1..203: mol_type = other DNA

SEQ ID NO: 29186 - DNA, 203 bp, synthetic construct; identical to SEQ ID NO: 1097
  source 1..203: mol_type = other DNA

SEQ ID NO: 29187 - DNA, 203 bp, synthetic construct; identical to SEQ ID NO: 1098
  source 1..203: mol_type = other DNA

SEQ ID NO: 29188 - DNA, 203 bp, synthetic construct; identical to SEQ ID NO: 1101
  source 1..203: mol_type = other DNA

SEQ ID NO: 29189 - DNA, 203 bp, synthetic construct; identical to SEQ ID NO: 1106
  source 1..203: mol_type = other DNA

SEQ ID NO: 29190 - DNA, 203 bp, synthetic construct; identical to SEQ ID NO: 1111
  source 1..203: mol_type = other DNA

SEQ ID NO: 29191 - DNA, 203 bp, synthetic construct; identical to SEQ ID NO: 1117
  source 1..203: mol_type = other DNA

SEQ ID NO: 29192 - DNA, 203 bp, synthetic construct; identical to SEQ ID NO: 1120
  source 1..203: mol_type = other DNA

SEQ ID NO: 29193 - DNA, 203 bp, synthetic construct; identical to SEQ ID NO: 1121
  source 1..203: mol_type = other DNA

SEQ ID NO: 29194 - DNA, 203 bp, synthetic construct; identical to SEQ ID NO: 1124
  source 1..203: mol_type = other DNA

SEQ ID NO: 29195 - DNA, 203 bp, synthetic construct; identical to SEQ ID NO: 1125
  source 1..203: mol_type = other DNA

SEQ ID NO: 29196 - DNA, 203 bp, synthetic construct; identical to SEQ ID NO: 1129
  source 1..203: mol_type = other DNA

SEQ ID NO: 29197 - DNA, 203 bp, synthetic construct; identical to SEQ ID NO: 1132
  source 1..203: mol_type = other DNA

SEQ ID NO: 29198 - DNA, 203 bp, synthetic construct; identical to SEQ ID NO: 1133
  source 1..203: mol_type = other DNA

SEQ ID NO: 29199 - DNA, 203 bp, synthetic construct; identical to SEQ ID NO: 1135
  source 1..203: mol_type = other DNA

SEQ ID NO: 29200 - DNA, 203 bp, synthetic construct; identical to SEQ ID NO: 1136
  source 1..203: mol_type = other DNA

SEQ ID NO: 29201 - DNA, 203 bp, synthetic construct; identical to SEQ ID NO: 1140
  source 1..203: mol_type = other DNA

SEQ ID NO: 29202 - DNA, 203 bp, synthetic construct; identical to SEQ ID NO: 1141
  source 1..203: mol_type = other DNA

SEQ ID NO: 29203 - DNA, 203 bp, synthetic construct; identical to SEQ ID NO: 1143
  source 1..203: mol_type = other DNA

SEQ ID NO: 29204 - DNA, 203 bp, synthetic construct; identical to SEQ ID NO: 1151
  source 1..203: mol_type = other DNA

SEQ ID NO: 29205 - DNA, 203 bp, synthetic construct; identical to SEQ ID NO: 1153
  source 1..203: mol_type = other DNA

SEQ ID NO: 29206 - DNA, 203 bp, synthetic construct; identical to SEQ ID NO: 1159
  source 1..203: mol_type = other DNA

SEQ ID NO: 29207 - DNA, 203 bp, synthetic construct; identical to SEQ ID NO: 1161
  source 1..203: mol_type = other DNA

SEQ ID NO: 29208 - DNA, 203 bp, synthetic construct; identical to SEQ ID NO: 1166
  source 1..203: mol_type = other DNA

SEQ ID NO: 29209 - DNA, 203 bp, synthetic construct; identical to SEQ ID NO: 1169
  source 1..203: mol_type = other DNA

SEQ ID NO: 29210 - DNA, 203 bp, synthetic construct; identical to SEQ ID NO: 1170
  source 1..203: mol_type = other DNA

SEQ ID NO: 29211 - DNA, 203 bp, synthetic construct; identical to SEQ ID NO: 1175
  source 1..203: mol_type = other DNA

SEQ ID NO: 29212 - DNA, 203 bp, synthetic construct; identical to SEQ ID NO: 1177
  source 1..203: mol_type = other DNA

SEQ ID NO: 29213 - DNA, 203 bp, synthetic construct; identical to SEQ ID NO: 1178
  source 1..203: mol_type = other DNA

SEQ ID NO: 29214 - DNA, 203 bp, synthetic construct; identical to SEQ ID NO: 1184
  source 1..203: mol_type = other DNA

SEQ ID NO: 29215 - DNA, 203 bp, synthetic construct; identical to SEQ ID NO: 1193
  source 1..203: mol_type = other DNA

SEQ ID NO: 29216 - DNA, 203 bp, synthetic construct; identical to SEQ ID NO: 1194
  source 1..203: mol_type = other DNA

SEQ ID NO: 29217 - DNA, 203 bp, synthetic construct; identical to SEQ ID NO: 1203
  source 1..203: mol_type = other DNA

SEQ ID NO: 29218 - DNA, 203 bp, synthetic construct; identical to SEQ ID NO: 1204
  source 1..203: mol_type = other DNA

SEQ ID NO: 29219 - DNA, 203 bp, synthetic construct; identical to SEQ ID NO: 1205
  source 1..203: mol_type = other DNA

SEQ ID NO: 29220 - DNA, 203 bp, synthetic construct; identical to SEQ ID NO: 1216
  source 1..203: mol_type = other DNA

SEQ ID NO: 29221 - DNA, 203 bp, synthetic construct; identical to SEQ ID NO: 1219
  source 1..203: mol_type = other DNA

SEQ ID NO: 29222 - DNA, 203 bp, synthetic construct; identical to SEQ ID NO: 1229
  source 1..203: mol_type = other DNA

SEQ ID NO: 29223 - DNA, 203 bp, synthetic construct; identical to SEQ ID NO: 1230
  source 1..203: mol_type = other DNA

SEQ ID NO: 29224 - DNA, 203 bp, synthetic construct; identical to SEQ ID NO: 1233
  source 1..203: mol_type = other DNA

SEQ ID NO: 29225 - DNA, 203 bp, synthetic construct; identical to SEQ ID NO: 1243
  source 1..203: mol_type = other DNA

SEQ ID NO: 29226 - DNA, 203 bp, synthetic construct; identical to SEQ ID NO: 1246
  source 1..203: mol_type = other DNA

SEQ ID NO: 29227 - DNA, 203 bp, synthetic construct; identical to SEQ ID NO: 1249
  source 1..203: mol_type = other DNA

SEQ ID NO: 29228 - DNA, 203 bp, synthetic construct; identical to SEQ ID NO: 1252
  source 1..203: mol_type = other DNA

SEQ ID NO: 29229 - DNA, 203 bp, synthetic construct; identical to SEQ ID NO: 1256
  source 1..203: mol_type = other DNA

SEQ ID NO: 29230 - DNA, 203 bp, synthetic construct; identical to SEQ ID NO: 3
  source 1..203: mol_type = other DNA

SEQ ID NO: 29231 - DNA, 203 bp, synthetic construct; identical to SEQ ID NO: 1258
  source 1..203: mol_type = other DNA

SEQ ID NO: 29232 - DNA, 203 bp, synthetic construct; identical to SEQ ID NO: 4
  source 1..203: mol_type = other DNA

SEQ ID NO: 29233 - DNA, 203 bp, synthetic construct; identical to SEQ ID NO: 1262
  source 1..203: mol_type = other DNA

SEQ ID NO: 29234 - DNA, 203 bp, synthetic construct; identical to SEQ ID NO: 1264
  source 1..203: mol_type = other DNA

SEQ ID NO: 29235 - DNA, 203 bp, synthetic construct; identical to SEQ ID NO: 1265
  source 1..203: mol_type = other DNA

SEQ ID NO: 29236 - DNA, 203 bp, synthetic construct; identical to SEQ ID NO: 1276
  source 1..203: mol_type = other DNA

SEQ ID NO: 29237 - DNA, 203 bp, synthetic construct; identical to SEQ ID NO: 1278
  source 1..203: mol_type = other DNA

SEQ ID NO: 29238 - DNA, 203 bp, synthetic construct; identical to SEQ ID NO: 1283
  source 1..203: mol_type = other DNA

SEQ ID NO: 29239 - DNA, 203 bp, synthetic construct; identical to SEQ ID NO: 1286
  source 1..203: mol_type = other DNA

SEQ ID NO: 29240 - DNA, 203 bp, synthetic construct; identical to SEQ ID NO: 1287
  source 1..203: mol_type = other DNA

SEQ ID NO: 29241 - DNA, 203 bp, synthetic construct; identical to SEQ ID NO: 1288
  source 1..203: mol_type = other DNA

SEQ ID NO: 29242 - DNA, 203 bp, synthetic construct; identical to SEQ ID NO: 1292
  source 1..203: mol_type = other DNA

SEQ ID NO: 29243 - DNA, 203 bp, synthetic construct; identical to SEQ ID NO: 1307
  source 1..203: mol_type = other DNA

SEQ ID NO: 29244 - DNA, 203 bp, synthetic construct; identical to SEQ ID NO: 1309
  source 1..203: mol_type = other DNA

SEQ ID NO: 29245 - DNA, 203 bp, synthetic construct; identical to SEQ ID NO: 1310
  source 1..203: mol_type = other DNA

SEQ ID NO: 29246 - DNA, 203 bp, synthetic construct; identical to SEQ ID NO: 1312
  source 1..203: mol_type = other DNA

SEQ ID NO: 29247 - DNA, 203 bp, synthetic construct; identical to SEQ ID NO: 1319
  source 1..203: mol_type = other DNA

SEQ ID NO: 29248 - DNA, 203 bp, synthetic construct; identical to SEQ ID NO: 1320
  source 1..203: mol_type = other DNA

SEQ ID NO: 29249 - DNA, 203 bp, synthetic construct; identical to SEQ ID NO: 1322
  source 1..203: mol_type = other DNA

SEQ ID NO: 29250 - DNA, 203 bp, synthetic construct; identical to SEQ ID NO: 1325
  source 1..203: mol_type = other DNA

SEQ ID NO: 29251 - DNA, 203 bp, synthetic construct; identical to SEQ ID NO: 1328
  source 1..203: mol_type = other DNA

SEQ ID NO: 29252 - DNA, 203 bp, synthetic construct; identical to SEQ ID NO: 1329
  source 1..203: mol_type = other DNA

SEQ ID NO: 29253 - DNA, 203 bp, synthetic construct; identical to SEQ ID NO: 1330
  source 1..203: mol_type = other DNA

SEQ ID NO: 29254 - DNA, 203 bp, synthetic construct; identical to SEQ ID NO: 1339
  source 1..203: mol_type = other DNA

SEQ ID NO: 29255 - DNA, 203 bp, synthetic construct; identical to SEQ ID NO: 1355
  source 1..203: mol_type = other DNA

SEQ ID NO: 29256 - DNA, 203 bp, synthetic construct; identical to SEQ ID NO: 1358
  source 1..203: mol_type = other DNA

SEQ ID NO: 29257 - DNA, 203 bp, synthetic construct; identical to SEQ ID NO: 1361
  source 1..203: mol_type = other DNA

SEQ ID NO: 29258 - DNA, 203 bp, synthetic construct; identical to SEQ ID NO: 1362
  source 1..203: mol_type = other DNA

SEQ ID NO: 29259 - DNA, 203 bp, synthetic construct; identical to SEQ ID NO: 1366
  source 1..203: mol_type = other DNA

SEQ ID NO: 29260 - DNA, 203 bp, synthetic construct; identical to SEQ ID NO: 1369
  source 1..203: mol_type = other DNA

SEQ ID NO: 29261 - DNA, 203 bp, synthetic construct; identical to SEQ ID NO: 1372
  source 1..203: mol_type = other DNA

SEQ ID NO: 29262 - DNA, 203 bp, synthetic construct; identical to SEQ ID NO: 1375
  source 1..203: mol_type = other DNA

SEQ ID NO: 29263 - DNA, 203 bp, synthetic construct; identical to SEQ ID NO: 1376
  source 1..203: mol_type = other DNA

SEQ ID NO: 29264 - DNA, 203 bp, synthetic construct; identical to SEQ ID NO: 1379
  source 1..203: mol_type = other DNA

SEQ ID NO: 29265 - DNA, 203 bp, synthetic construct; identical to SEQ ID NO: 1384
  source 1..203: mol_type = other DNA

SEQ ID NO: 29266 - DNA, 203 bp, synthetic construct; identical to SEQ ID NO: 1387
  source 1..203: mol_type = other DNA

SEQ ID NO: 29267 - DNA, 203 bp, synthetic construct; identical to SEQ ID NO: 1388
  source 1..203: mol_type = other DNA

SEQ ID NO: 29268 - DNA, 203 bp, synthetic construct; identical to SEQ ID NO: 1389
  source 1..203: mol_type = other DNA

SEQ ID NO: 29269 - DNA, 203 bp, synthetic construct; identical to SEQ ID NO: 1390
  source 1..203: mol_type = other DNA

SEQ ID NO: 29270 - DNA, 203 bp, synthetic construct; identical to SEQ ID NO: 1394
  source 1..203: mol_type = other DNA

SEQ ID NO: 29271 - DNA, 203 bp, synthetic construct; identical to SEQ ID NO: 1395
  source 1..203: mol_type = other DNA

SEQ ID NO: 29272 - DNA, 203 bp, synthetic construct; identical to SEQ ID NO: 1399
  source 1..203: mol_type = other DNA

SEQ ID NO: 29273 - DNA, 203 bp, synthetic construct; identical to SEQ ID NO: 1401
  source 1..203: mol_type = other DNA

SEQ ID NO: 29274 - DNA, 203 bp, synthetic construct; identical to SEQ ID NO: 1403
  source 1..203: mol_type = other DNA

SEQ ID NO: 29275 - DNA, 203 bp, synthetic construct; identical to SEQ ID NO: 1405
  source 1..203: mol_type = other DNA

SEQ ID NO: 29276 - DNA, 203 bp, synthetic construct; identical to SEQ ID NO: 1409
  source 1..203: mol_type = other DNA

SEQ ID NO: 29277 - DNA, 203 bp, synthetic construct; identical to SEQ ID NO: 1410
  source 1..203: mol_type = other DNA

SEQ ID NO: 29278 - DNA, 203 bp, synthetic construct; identical to SEQ ID NO: 1413
  source 1..203: mol_type = other DNA

SEQ ID NO: 29279 - DNA, 203 bp, synthetic construct; identical to SEQ ID NO: 1415
  source 1..203: mol_type = other DNA

SEQ ID NO: 29280 - DNA, 203 bp, synthetic construct; identical to SEQ ID NO: 1417
  source 1..203: mol_type = other DNA

SEQ ID NO: 29281 - DNA, 203 bp, synthetic construct; identical to SEQ ID NO: 1424
  source 1..203: mol_type = other DNA

SEQ ID NO: 29282 - DNA, 203 bp, synthetic construct; identical to SEQ ID NO: 1431
  source 1..203: mol_type = other DNA

SEQ ID NO: 29283 - DNA, 203 bp, synthetic construct; identical to SEQ ID NO: 1432
  source 1..203: mol_type = other DNA

SEQ ID NO: 29284 - DNA, 203 bp, synthetic construct; identical to SEQ ID NO: 1438
  source 1..203: mol_type = other DNA

SEQ ID NO: 29285 - DNA, 203 bp, synthetic construct; identical to SEQ ID NO: 1444
  source 1..203: mol_type = other DNA

SEQ ID NO: 29286 - DNA, 203 bp, synthetic construct; identical to SEQ ID NO: 1458
  source 1..203: mol_type = other DNA

SEQ ID NO: 29287 - DNA, 203 bp, synthetic construct; identical to SEQ ID NO: 1459
  source 1..203: mol_type = other DNA

SEQ ID NO: 29288 - DNA, 203 bp, synthetic construct; identical to SEQ ID NO: 1460
  source 1..203: mol_type = other DNA

SEQ ID NO: 29289 - DNA, 203 bp, synthetic construct; identical to SEQ ID NO: 1464
  source 1..203: mol_type = other DNA

SEQ ID NO: 29290 - DNA, 203 bp, synthetic construct; identical to SEQ ID NO: 1467
  source 1..203: mol_type = other DNA

SEQ ID NO: 29291 - DNA, 203 bp, synthetic construct; identical to SEQ ID NO: 1469
  source 1..203: mol_type = other DNA

SEQ ID NO: 29292 - DNA, 203 bp, synthetic construct; identical to SEQ ID NO: 1474
  source 1..203: mol_type = other DNA

SEQ ID NO: 29293 - DNA, 203 bp, synthetic construct; identical to SEQ ID NO: 1476
  source 1..203: mol_type = other DNA

SEQ ID NO: 29294 - DNA, 203 bp, synthetic construct; identical to SEQ ID NO: 1478
  source 1..203: mol_type = other DNA

SEQ ID NO: 29295 - DNA, 203 bp, synthetic construct; identical to SEQ ID NO: 1480
  source 1..203: mol_type = other DNA

SEQ ID NO: 29296 - DNA, 203 bp, synthetic construct; identical to SEQ ID NO: 1481
  source 1..203: mol_type = other DNA

SEQ ID NO: 29297 - DNA, 203 bp, synthetic construct; identical to SEQ ID NO: 1485
  source 1..203: mol_type = other DNA

SEQ ID NO: 29298 - DNA, 203 bp, synthetic construct; identical to SEQ ID NO: 1493
  source 1..203: mol_type = other DNA

SEQ ID NO: 29299 - DNA, 203 bp, synthetic construct; identical to SEQ ID NO: 1497
  source 1..203: mol_type = other DNA

SEQ ID NO: 29300 - DNA, 203 bp, synthetic construct; identical to SEQ ID NO: 1499
  source 1..203: mol_type = other DNA

SEQ ID NO: 29301 - DNA, 203 bp, synthetic construct; identical to SEQ ID NO: 1502
  source 1..203: mol_type = other DNA

SEQ ID NO: 29302 - DNA, 203 bp, synthetic construct; identical to SEQ ID NO: 1506
  source 1..203: mol_type = other DNA

SEQ ID NO: 29303 - DNA, 203 bp, synthetic construct; identical to SEQ ID NO: 1525
  source 1..203: mol_type = other DNA

SEQ ID NO: 29304 - DNA, 203 bp, synthetic construct; identical to SEQ ID NO: 1527
  source 1..203: mol_type = other DNA

SEQ ID NO: 29305 - DNA, 203 bp, synthetic construct; identical to SEQ ID NO: 1530
  source 1..203: mol_type = other DNA

SEQ ID NO: 29306 - DNA, 203 bp, synthetic construct; identical to SEQ ID NO: 1535
  source 1..203: mol_type = other DNA

SEQ ID NO: 29307 - DNA, 203 bp, synthetic construct; identical to SEQ ID NO: 1538
  source 1..203: mol_type = other DNA

SEQ ID NO: 29308 - DNA, 203 bp, synthetic construct; identical to SEQ ID NO: 1541
  source 1..203: mol_type = other DNA

SEQ ID NO: 29309 - DNA, 203 bp, synthetic construct; identical to SEQ ID NO: 1551
  source 1..203: mol_type = other DNA

SEQ ID NO: 29310 - DNA, 203 bp, synthetic construct; identical to SEQ ID NO: 1555
  source 1..203: mol_type = other DNA

SEQ ID NO: 29311 - DNA, 203 bp, synthetic construct; identical to SEQ ID NO: 1558
  source 1..203: mol_type = other DNA

SEQ ID NO: 29312 - DNA, 203 bp, synthetic construct; identical to SEQ ID NO: 1562
  source 1..203: mol_type = other DNA

SEQ ID NO: 29313 - DNA, 203 bp, synthetic construct; identical to SEQ ID NO: 1568
  source 1..203: mol_type = other DNA

SEQ ID NO: 29314 - DNA, 203 bp, synthetic construct; identical to SEQ ID NO: 1570
  source 1..203: mol_type = other DNA

SEQ ID NO: 29315 - DNA, 203 bp, synthetic construct; identical to SEQ ID NO: 1576
  source 1..203: mol_type = other DNA

SEQ ID NO: 29316 - DNA, 203 bp, synthetic construct; identical to SEQ ID NO: 1577
  source 1..203: mol_type = other DNA

SEQ ID NO: 29317 - DNA, 203 bp, synthetic construct; identical to SEQ ID NO: 1579
  source 1..203: mol_type = other DNA

SEQ ID NO: 29318 - DNA, 203 bp, synthetic construct; identical to SEQ ID NO: 1589
  source 1..203: mol_type = other DNA

SEQ ID NO: 29319 - DNA, 203 bp, synthetic construct; identical to SEQ ID NO: 1590
  source 1..203: mol_type = other DNA

SEQ ID NO: 29320 - DNA, 203 bp, synthetic construct; identical to SEQ ID NO: 1591
  source 1..203: mol_type = other DNA

SEQ ID NO: 29321 - DNA, 203 bp, synthetic construct; identical to SEQ ID NO: 1596
  source 1..203: mol_type = other DNA

SEQ ID NO: 29322 - DNA, 203 bp, synthetic construct; identical to SEQ ID NO: 1597
  source 1..203: mol_type = other DNA

SEQ ID NO: 29323 - DNA, 203 bp, synthetic construct; identical to SEQ ID NO: 1600
  source 1..203: mol_type = other DNA

SEQ ID NO: 29324 - DNA, 203 bp, synthetic construct; identical to SEQ ID NO: 1602
  source 1..203: mol_type = other DNA

SEQ ID NO: 29325 - DNA, 203 bp, synthetic construct; identical to SEQ ID NO: 1610
  source 1..203: mol_type = other DNA

SEQ ID NO: 29326 - DNA, 203 bp, synthetic construct; identical to SEQ ID NO: 1612
  source 1..203: mol_type = other DNA

SEQ ID NO: 29327 - DNA, 203 bp, synthetic construct; identical to SEQ ID NO: 1616
  source 1..203: mol_type = other DNA

SEQ ID NO: 29328 - DNA, 203 bp, synthetic construct; identical to SEQ ID NO: 1618
  source 1..203: mol_type = other DNA

SEQ ID NO: 29329 - DNA, 203 bp, synthetic construct; identical to SEQ ID NO: 1620
  source 1..203: mol_type = other DNA

SEQ ID NO: 29330 - DNA, 203 bp, synthetic construct; identical to SEQ ID NO: 1621
  source 1..203: mol_type = other DNA

SEQ ID NO: 29331 - DNA, 203 bp, synthetic construct; identical to SEQ ID NO: 1637
  source 1..203: mol_type = other DNA

SEQ ID NO: 29332 - DNA, 203 bp, synthetic construct; identical to SEQ ID NO: 1640
  source 1..203: mol_type = other DNA

SEQ ID NO: 29333 - DNA, 203 bp, synthetic construct; identical to SEQ ID NO: 1641
  source 1..203: mol_type = other DNA

SEQ ID NO: 29334 - DNA, 203 bp, synthetic construct; identical to SEQ ID NO: 1645
  source 1..203: mol_type = other DNA

SEQ ID NO: 29335 - DNA, 203 bp, synthetic construct; identical to SEQ ID NO: 1646
  source 1..203: mol_type = other DNA

SEQ ID NO: 29336 - DNA, 203 bp, synthetic construct; identical to SEQ ID NO: 1647
  source 1..203: mol_type = other DNA

SEQ ID NO: 29337 - DNA, 203 bp, synthetic construct; identical to SEQ ID NO: 1650
  source 1..203: mol_type = other DNA

SEQ ID NO: 29338 - DNA, 203 bp, synthetic construct; identical to SEQ ID NO: 1655
  source 1..203: mol_type = other DNA

SEQ ID NO: 29339 - DNA, 203 bp, synthetic construct; identical to SEQ ID NO: 1656
  source 1..203: mol_type = other DNA

SEQ ID NO: 29340 - DNA, 203 bp, synthetic construct; identical to SEQ ID NO: 1657
  source 1..203: mol_type = other DNA

SEQ ID NO: 29341 - DNA, 203 bp, synthetic construct; identical to SEQ ID NO: 1659
  source 1..203: mol_type = other DNA

SEQ ID NO: 29342 - DNA, 203 bp, synthetic construct; identical to SEQ ID NO: 1660
  source 1..203: mol_type = other DNA

SEQ ID NO: 29343 - DNA, 203 bp, synthetic construct; identical to SEQ ID NO: 1661
  source 1..203: mol_type = other DNA

SEQ ID NO: 29344 - DNA, 203 bp, synthetic construct; identical to SEQ ID NO: 1665
  source 1..203: mol_type = other DNA

SEQ ID NO: 29345 - DNA, 203 bp, synthetic construct; identical to SEQ ID NO: 1670
  source 1..203: mol_type = other DNA

SEQ ID NO: 29346 - DNA, 203 bp, synthetic construct; identical to SEQ ID NO: 1673
  source 1..203: mol_type = other DNA

SEQ ID NO: 29347 - DNA, 203 bp, synthetic construct; identical to SEQ ID NO: 1676
  source 1..203: mol_type = other DNA

SEQ ID NO: 29348 - DNA, 203 bp, synthetic construct; identical to SEQ ID NO: 1683
  source 1..203: mol_type = other DNA

SEQ ID NO: 29349 - DNA, 203 bp, synthetic construct; identical to SEQ ID NO: 1695
  source 1..203: mol_type = other DNA

SEQ ID NO: 29350 - DNA, 203 bp, synthetic construct; identical to SEQ ID NO: 1697
  source 1..203: mol_type = other DNA

SEQ ID NO: 29351 - DNA, 203 bp, synthetic construct; identical to SEQ ID NO: 1700
  source 1..203: mol_type = other DNA

SEQ ID NO: 29352 - DNA, 203 bp, synthetic construct; identical to SEQ ID NO: 1701
  source 1..203: mol_type = other DNA

SEQ ID NO: 29353 - DNA, 203 bp, synthetic construct; identical to SEQ ID NO: 1704
  source 1..203: mol_type = other DNA

SEQ ID NO: 29354 - DNA, 203 bp, synthetic construct; identical to SEQ ID NO: 1707
  source 1..203: mol_type = other DNA

SEQ ID NO: 29355 - DNA, 203 bp, synthetic construct; identical to SEQ ID NO: 1709
  source 1..203: mol_type = other DNA

SEQ ID NO: 29356 - DNA, 203 bp, synthetic construct; identical to SEQ ID NO: 1710
  source 1..203: mol_type = other DNA

SEQ ID NO: 29357 - DNA, 203 bp, synthetic construct; identical to SEQ ID NO: 5
  source 1..203: mol_type = other DNA

SEQ ID NO: 29358 - DNA, 203 bp, synthetic construct; identical to SEQ ID NO: 1714
  source 1..203: mol_type = other DNA

SEQ ID NO: 29359 - DNA, 203 bp, synthetic construct; identical to SEQ ID NO: 1715
  source 1..203: mol_type = other DNA

SEQ ID NO: 29360 - DNA, 203 bp, synthetic construct; identical to SEQ ID NO: 1718
  source 1..203: mol_type = other DNA

SEQ ID NO: 29361 - DNA, 203 bp, synthetic construct; identical to SEQ ID NO: 1720
  source 1..203: mol_type = other DNA

SEQ ID NO: 29362 - DNA, 203 bp, synthetic construct; identical to SEQ ID NO: 1723
  source 1..203: mol_type = other DNA

SEQ ID NO: 29363 - DNA, 203 bp, synthetic construct; identical to SEQ ID NO: 1724
  source 1..203: mol_type = other DNA

SEQ ID NO: 29364 - DNA, 203 bp, synthetic construct; identical to SEQ ID NO: 1725
  source 1..203: mol_type = other DNA

SEQ ID NO: 29365 - DNA, 203 bp, synthetic construct; identical to SEQ ID NO: 1726
  source 1..203: mol_type = other DNA

SEQ ID NO: 29366 - DNA, 203 bp, synthetic construct; identical to SEQ ID NO: 1727
  source 1..203: mol_type = other DNA

SEQ ID NO: 29367 - DNA, 203 bp, synthetic construct; identical to SEQ ID NO: 1729
  source 1..203: mol_type = other DNA

SEQ ID NO: 29368 - DNA, 203 bp, synthetic construct; identical to SEQ ID NO: 1748
  source 1..203: mol_type = other DNA

SEQ ID NO: 29369 - DNA, 203 bp, synthetic construct; identical to SEQ ID NO: 1756
  source 1..203: mol_type = other DNA

SEQ ID NO: 29370 - DNA, 203 bp, synthetic construct; identical to SEQ ID NO: 1758
  source 1..203: mol_type = other DNA

SEQ ID NO: 29371 - DNA, 203 bp, synthetic construct; identical to SEQ ID NO: 1760
  source 1..203: mol_type = other DNA

SEQ ID NO: 29372 - DNA, 203 bp, synthetic construct; identical to SEQ ID NO: 1766
  source 1..203: mol_type = other DNA

SEQ ID NO: 29373 - DNA, 203 bp, synthetic construct; identical to SEQ ID NO: 1767
  source 1..203: mol_type = other DNA

SEQ ID NO: 29374 - DNA, 203 bp, synthetic construct; identical to SEQ ID NO: 1768
  source 1..203: mol_type = other DNA

SEQ ID NO: 29375 - DNA, 203 bp, synthetic construct; identical to SEQ ID NO: 1778
  source 1..203: mol_type = other DNA

SEQ ID NO: 29376 - DNA, 203 bp, synthetic construct; identical to SEQ ID NO: 1779
  source 1..203: mol_type = other DNA

SEQ ID NO: 29377 - DNA, 203 bp, synthetic construct; identical to SEQ ID NO: 1781
  source 1..203: mol_type = other DNA

SEQ ID NO: 29378 - DNA, 203 bp, synthetic construct; identical to SEQ ID NO: 1782
  source 1..203: mol_type = other DNA

SEQ ID NO: 29379 - DNA, 203 bp, synthetic construct; identical to SEQ ID NO: 1793
  source 1..203: mol_type = other DNA

SEQ ID NO: 29380 - DNA, 203 bp, synthetic construct; identical to SEQ ID NO: 1794
  source 1..203: mol_type = other DNA

SEQ ID NO: 29381 - DNA, 203 bp, synthetic construct; identical to SEQ ID NO: 1795
  source 1..203: mol_type = other DNA

SEQ ID NO: 29382 - DNA, 203 bp, synthetic construct; identical to SEQ ID NO: 1803
  source 1..203: mol_type = other DNA

SEQ ID NO: 29383 - DNA, 203 bp, synthetic construct; identical to SEQ ID NO: 1810
  source 1..203: mol_type = other DNA

SEQ ID NO: 29384 - DNA, 203 bp, synthetic construct; identical to SEQ ID NO: 1814
  source 1..203: mol_type = other DNA

SEQ ID NO: 29385 - DNA, 203 bp, synthetic construct; identical to SEQ ID NO: 1817
  source 1..203: mol_type = other DNA

SEQ ID NO: 29386 - DNA, 203 bp, synthetic construct; identical to SEQ ID NO: 1820
  source 1..203: mol_type = other DNA

SEQ ID NO: 29387 - DNA, 203 bp, synthetic construct; identical to SEQ ID NO: 1822
  source 1..203: mol_type = other DNA

SEQ ID NO: 29388 - DNA, 203 bp, synthetic construct; identical to SEQ ID NO: 1823
  source 1..203: mol_type = other DNA

SEQ ID NO: 29389 - DNA, 203 bp, synthetic construct; identical to SEQ ID NO: 1834
  source 1..203: mol_type = other DNA

SEQ ID NO: 29390 - DNA, 203 bp, synthetic construct; identical to SEQ ID NO: 1835
  source 1..203: mol_type = other DNA

SEQ ID NO: 29391 - DNA, 203 bp, synthetic construct; identical to SEQ ID NO: 1843
  source 1..203: mol_type = other DNA

SEQ ID NO: 29392 - DNA, 203 bp, synthetic construct; identical to SEQ ID NO: 1844
  source 1..203: mol_type = other DNA

SEQ ID NO: 29393 - DNA, 203 bp, synthetic construct; identical to SEQ ID NO: 1850
  source 1..203: mol_type = other DNA

SEQ ID NO: 29394 - DNA, 203 bp, synthetic construct; identical to SEQ ID NO: 1852
  source 1..203: mol_type = other DNA

SEQ ID NO: 29395 - DNA, 203 bp, synthetic construct; identical to SEQ ID NO: 1854
  source 1..203: mol_type = other DNA

SEQ ID NO: 29396 - DNA, 203 bp, synthetic construct; identical to SEQ ID NO: 1855
  source 1..203: mol_type = other DNA

SEQ ID NO: 29397 - DNA, 203 bp, synthetic construct; identical to SEQ ID NO: 1869
  source 1..203: mol_type = other DNA

SEQ ID NO: 29398 - DNA, 203 bp, synthetic construct; identical to SEQ ID NO: 1870
  source 1..203: mol_type = other DNA

SEQ ID NO: 29399 - DNA, 203 bp, synthetic construct; identical to SEQ ID NO: 1879
  source 1..203: mol_type = other DNA

SEQ ID NO: 29400 - DNA, 203 bp, synthetic construct; identical to SEQ ID NO: 1880
  source 1..203: mol_type = other DNA

SEQ ID NO: 29401 - DNA, 203 bp, synthetic construct; identical to SEQ ID NO: 1886
  source 1..203: mol_type = other DNA

SEQ ID NO: 29402 - DNA, 203 bp, synthetic construct; identical to SEQ ID NO: 1888
  source 1..203: mol_type = other DNA

SEQ ID NO: 29403 - DNA, 203 bp, synthetic construct; identical to SEQ ID NO: 1890
  source 1..203: mol_type = other DNA

SEQ ID NO: 29404 - DNA, 203 bp, synthetic construct; identical to SEQ ID NO: 1893
  source 1..203: mol_type = other DNA

SEQ ID NO: 29405 - DNA, 203 bp, synthetic construct; identical to SEQ ID NO: 1896
  source 1..203: mol_type = other DNA

SEQ ID NO: 29406 - DNA, 203 bp, synthetic construct; identical to SEQ ID NO: 1897
  source 1..203: mol_type = other DNA

SEQ ID NO: 29407 - DNA, 203 bp, synthetic construct; identical to SEQ ID NO: 1898
  source 1..203: mol_type = other DNA

SEQ ID NO: 29408 - DNA, 203 bp, synthetic construct; identical to SEQ ID NO: 1899
  source 1..203: mol_type = other DNA

SEQ ID NO: 29409 - DNA, 203 bp, synthetic construct; identical to SEQ ID NO: 1900
  source 1..203: mol_type = other DNA

SEQ ID NO: 29410 - DNA, 203 bp, synthetic construct; identical to SEQ ID NO: 1904
  source 1..203: mol_type = other DNA

SEQ ID NO: 29411 - DNA, 203 bp, synthetic construct; identical to SEQ ID NO: 1905
  source 1..203: mol_type = other DNA

SEQ ID NO: 29412 - DNA, 203 bp, synthetic construct; identical to SEQ ID NO: 1920
  source 1..203: mol_type = other DNA

SEQ ID NO: 29413 - DNA, 203 bp, synthetic construct; identical to SEQ ID NO: 1922
  source 1..203: mol_type = other DNA

SEQ ID NO: 29414 - DNA, 203 bp, synthetic construct; identical to SEQ ID NO: 1926
  source 1..203: mol_type = other DNA

SEQ ID NO: 29415 - DNA, 203 bp, synthetic construct; identical to SEQ ID NO: 1929
  source 1..203: mol_type = other DNA

SEQ ID NO: 29416 - DNA, 203 bp, synthetic construct; identical to SEQ ID NO: 1934
  source 1..203: mol_type = other DNA

SEQ ID NO: 29417 - DNA, 203 bp, synthetic construct; identical to SEQ ID NO: 1935
  source 1..203: mol_type = other DNA

SEQ ID NO: 29418 - DNA, 203 bp, synthetic construct; identical to SEQ ID NO: 1940
  source 1..203: mol_type = other DNA

SEQ ID NO: 29419 - DNA, 203 bp, synthetic construct; identical to SEQ ID NO: 1943
  source 1..203: mol_type = other DNA

SEQ ID NO: 29420 - DNA, 203 bp, synthetic construct; identical to SEQ ID NO: 1945
  source 1..203: mol_type = other DNA

SEQ ID NO: 29421 - DNA, 203 bp, synthetic construct; identical to SEQ ID NO: 1946
  source 1..203: mol_type = other DNA

SEQ ID NO: 29422 - DNA, 203 bp, synthetic construct; identical to SEQ ID NO: 1948
  source 1..203: mol_type = other DNA

SEQ ID NO: 29423 - DNA, 203 bp, synthetic construct; identical to SEQ ID NO: 1949
  source 1..203: mol_type = other DNA

SEQ ID NO: 29424 - DNA, 203 bp, synthetic construct; identical to SEQ ID NO: 1950
  source 1..203: mol_type = other DNA

SEQ ID NO: 29425 - DNA, 203 bp, synthetic construct; identical to SEQ ID NO: 1951
  source 1..203: mol_type = other DNA

SEQ ID NO: 29426 - DNA, 203 bp, synthetic construct; identical to SEQ ID NO: 1952
  source 1..203: mol_type = other DNA

SEQ ID NO: 29427 - DNA, 203 bp, synthetic construct; identical to SEQ ID NO: 1953
  source 1..203: mol_type = other DNA

SEQ ID NO: 29428 - DNA, 203 bp, synthetic construct; identical to SEQ ID NO: 1954
  source 1..203: mol_type = other DNA

SEQ ID NO: 29429 - DNA, 203 bp, synthetic construct; identical to SEQ ID NO: 1955
  source 1..203: mol_type = other DNA

SEQ ID NO: 29430 - DNA, 203 bp, synthetic construct; identical to SEQ ID NO: 1956
  source 1..203: mol_type = other DNA

SEQ ID NO: 29431 - DNA, 203 bp, synthetic construct; identical to SEQ ID NO: 1965
  source 1..203: mol_type = other DNA

SEQ ID NO: 29432 - DNA, 203 bp, synthetic construct; identical to SEQ ID NO: 1970
  source 1..203: mol_type = other DNA

SEQ ID NO: 29433 - DNA, 203 bp, synthetic construct; identical to SEQ ID NO: 1973
  source 1..203: mol_type = other DNA

SEQ ID NO: 29434 - DNA, 203 bp, synthetic construct; identical to SEQ ID NO: 1978
  source 1..203: mol_type = other DNA

SEQ ID NO: 29435 - DNA, 203 bp, synthetic construct; identical to SEQ ID NO: 1979
  source 1..203: mol_type = other DNA

SEQ ID NO: 29436 - DNA, 203 bp, synthetic construct; identical to SEQ ID NO: 1984
  source 1..203: mol_type = other DNA

SEQ ID NO: 29437 - DNA, 203 bp, synthetic construct; identical to SEQ ID NO: 1987
  source 1..203: mol_type = other DNA

SEQ ID NO: 29438 - DNA, 203 bp, synthetic construct; identical to SEQ ID NO: 1990
  source 1..203: mol_type = other DNA

SEQ ID NO: 29439 - DNA, 203 bp, synthetic construct; identical to SEQ ID NO: 1992
  source 1..203: mol_type = other DNA

SEQ ID NO: 29440 - DNA, 203 bp, synthetic construct; identical to SEQ ID NO: 1993
  source 1..203: mol_type = other DNA

SEQ ID NO: 29441 - DNA, 203 bp, synthetic construct; identical to SEQ ID NO: 1999
  source 1..203: mol_type = other DNA

SEQ ID NO: 29442 - DNA, 203 bp, synthetic construct; identical to SEQ ID NO: 2004
  source 1..203: mol_type = other DNA

SEQ ID NO: 29443 - DNA, 203 bp, synthetic construct; identical to SEQ ID NO: 2006
  source 1..203: mol_type = other DNA

SEQ ID NO: 29444 - DNA, 203 bp, synthetic construct; identical to SEQ ID NO: 2035
  source 1..203: mol_type = other DNA

SEQ ID NO: 29445 - DNA, 203 bp, synthetic construct; identical to SEQ ID NO: 2038
  source 1..203: mol_type = other DNA

SEQ ID NO: 29446 - DNA, 203 bp, synthetic construct; identical to SEQ ID NO: 2039
  source 1..203: mol_type = other DNA

SEQ ID NO: 29447 - DNA, 203 bp, synthetic construct; identical to SEQ ID NO: 2040
  source 1..203: mol_type = other DNA

SEQ ID NO: 29448 - DNA, 203 bp, synthetic construct; identical to SEQ ID NO: 2041
  source 1..203: mol_type = other DNA

SEQ ID NO: 29449 - DNA, 203 bp, synthetic construct; identical to SEQ ID NO: 2042
  source 1..203: mol_type = other DNA

SEQ ID NO: 29450 - DNA, 203 bp, synthetic construct; identical to SEQ ID NO: 2043
  source 1..203: mol_type = other DNA

SEQ ID NO: 29451 - DNA, 203 bp, synthetic construct; identical to SEQ ID NO: 2044
  source 1..203: mol_type = other DNA

SEQ ID NO: 29452 - DNA, 203 bp, synthetic construct; identical to SEQ ID NO: 2045
  source 1..203: mol_type = other DNA

SEQ ID NO: 29453 - DNA, 203 bp, synthetic construct; identical to SEQ ID NO: 2046
  source 1..203: mol_type = other DNA

SEQ ID NO: 29454 - DNA, 203 bp, synthetic construct; identical to SEQ ID NO: 2047
  source 1..203: mol_type = other DNA

SEQ ID NO: 29455 - DNA, 203 bp, synthetic construct; identical to SEQ ID NO: 2048
  source 1..203: mol_type = other DNA

SEQ ID NO: 29456 - DNA, 203 bp, synthetic construct; identical to SEQ ID NO: 2049
  source 1..203: mol_type = other DNA

SEQ ID NO: 29457 - DNA, 203 bp, synthetic construct; identical to SEQ ID NO: 2050
  source 1..203: mol_type = other DNA

SEQ ID NO: 29458 - DNA, 203 bp, synthetic construct; identical to SEQ ID NO: 2053
  source 1..203: mol_type = other DNA

SEQ ID NO: 29459 - DNA, 203 bp, synthetic construct; identical to SEQ ID NO: 2055
  source 1..203: mol_type = other DNA

SEQ ID NO: 29460 - DNA, 203 bp, synthetic construct; identical to SEQ ID NO: 2062
  source 1..203: mol_type = other DNA

SEQ ID NO: 29461 - DNA, 203 bp, synthetic construct; identical to SEQ ID NO: 2065
  source 1..203: mol_type = other DNA

SEQ ID NO: 29462 - DNA, 203 bp, synthetic construct; identical to SEQ ID NO: 2068
  source 1..203: mol_type = other DNA

SEQ ID NO: 29463 - DNA, 203 bp, synthetic construct; identical to SEQ ID NO: 2069
  source 1..203: mol_type = other DNA

SEQ ID NO: 29464 - DNA, 203 bp, synthetic construct; identical to SEQ ID NO: 2070
  source 1..203: mol_type = other DNA

SEQ ID NO: 29465 - DNA, 203 bp, synthetic construct; identical to SEQ ID NO: 2071
  source 1..203: mol_type = other DNA

SEQ ID NO: 29466 - DNA, 203 bp, synthetic construct; identical to SEQ ID NO: 2073
  source 1..203: mol_type = other DNA

SEQ ID NO: 29467 - DNA, 203 bp, synthetic construct; identical to SEQ ID NO: 2074
  source 1..203: mol_type = other DNA

SEQ ID NO: 29468 - DNA, 203 bp, synthetic construct; identical to SEQ ID NO: 2075
  source 1..203: mol_type = other DNA

SEQ ID NO: 29469 - DNA, 203 bp, synthetic construct; identical to SEQ ID NO: 2076
  source 1..203: mol_type = other DNA

SEQ ID NO: 29470 - DNA, 203 bp, synthetic construct; identical to SEQ ID NO: 2077
  source 1..203: mol_type = other DNA

SEQ ID NO: 29471 - DNA, 203 bp, synthetic construct; identical to SEQ ID NO: 2087
  source 1..203: mol_type = other DNA

SEQ ID NO: 29472 - DNA, 203 bp, synthetic construct; identical to SEQ ID NO: 2092
  source 1..203: mol_type = other DNA

SEQ ID NO: 29473 - DNA, 203 bp, synthetic construct; identical to SEQ ID NO: 2096
  source 1..203: mol_type = other DNA

SEQ ID NO: 29474 - DNA, 203 bp, synthetic construct; identical to SEQ ID NO: 2103
  source 1..203: mol_type = other DNA

SEQ ID NO: 29475 - DNA, 203 bp, synthetic construct; identical to SEQ ID NO: 2108
  source 1..203: mol_type = other DNA

SEQ ID NO: 29476 - DNA, 203 bp, synthetic construct; identical to SEQ ID NO: 2109
  source 1..203: mol_type = other DNA

SEQ ID NO: 29477 - DNA, 203 bp, synthetic construct; identical to SEQ ID NO: 2110
  source 1..203: mol_type = other DNA

SEQ ID NO: 29478 - DNA, 203 bp, synthetic construct; identical to SEQ ID NO: 2111
  source 1..203: mol_type = other DNA

SEQ ID NO: 29479 - DNA, 203 bp, synthetic construct; identical to SEQ ID NO: 2119
  source 1..203: mol_type = other DNA

SEQ ID NO: 29480 - DNA, 203 bp, synthetic construct; identical to SEQ ID NO: 2122
  source 1..203: mol_type = other DNA

SEQ ID NO: 29481 - DNA, 203 bp, synthetic construct; identical to SEQ ID NO: 2138
  source 1..203: mol_type = other DNA

SEQ ID NO: 29482 - DNA, 203 bp, synthetic construct; identical to SEQ ID NO: 2139
  source 1..203: mol_type = other DNA

SEQ ID NO: 29483 - DNA, 203 bp, synthetic construct; identical to SEQ ID NO: 2142
  source 1..203: mol_type = other DNA

SEQ ID NO: 29484 - DNA, 203 bp, synthetic construct; identical to SEQ ID NO: 2144
  source 1..203: mol_type = other DNA

SEQ ID NO: 29485 - DNA, 203 bp, synthetic construct; identical to SEQ ID NO: 2152
  source 1..203: mol_type = other DNA

SEQ ID NO: 29486 - DNA, 203 bp, synthetic construct; identical to SEQ ID NO: 2165
  source 1..203: mol_type = other DNA

SEQ ID NO: 29487 - DNA, 203 bp, synthetic construct; identical to SEQ ID NO: 2171
  source 1..203: mol_type = other DNA

SEQ ID NO: 29488 - DNA, 203 bp, synthetic construct; identical to SEQ ID NO: 2172
  source 1..203: mol_type = other DNA

SEQ ID NO: 29489 - DNA, 203 bp, synthetic construct; identical to SEQ ID NO: 2176
  source 1..203: mol_type = other DNA

SEQ ID NO: 29490 - DNA, 203 bp, synthetic construct; identical to SEQ ID NO: 2177
  source 1..203: mol_type = other DNA

SEQ ID NO: 29491 - DNA, 203 bp, synthetic construct; identical to SEQ ID NO: 2183
  source 1..203: mol_type = other DNA

SEQ ID NO: 29492 - DNA, 203 bp, synthetic construct; identical to SEQ ID NO: 2184
  source 1..203: mol_type = other DNA

SEQ ID NO: 29493 - DNA, 203 bp, synthetic construct; identical to SEQ ID NO: 2186
  source 1..203: mol_type = other DNA

SEQ ID NO: 29494 - DNA, 203 bp, synthetic construct; identical to SEQ ID NO: 2189
  source 1..203: mol_type = other DNA

SEQ ID NO: 29495 - DNA, 203 bp, synthetic construct; identical to SEQ ID NO: 2190
  source 1..203: mol_type = other DNA

SEQ ID NO: 29496 - DNA, 203 bp, synthetic construct; identical to SEQ ID NO: 2191
  source 1..203: mol_type = other DNA

SEQ ID NO: 29497 - DNA, 203 bp, synthetic construct; identical to SEQ ID NO: 2193
  source 1..203: mol_type = other DNA

SEQ ID NO: 29498 - DNA, 203 bp, synthetic construct; identical to SEQ ID NO: 2198
  source 1..203: mol_type = other DNA

SEQ ID NO: 29499 - DNA, 203 bp, synthetic construct; identical to SEQ ID NO: 2200
  source 1..203: mol_type = other DNA

SEQ ID NO: 29500 - DNA, 203 bp, synthetic construct; identical to SEQ ID NO: 2201
  source 1..203: mol_type = other DNA

SEQ ID NO: 29501 - DNA, 203 bp, synthetic construct; identical to SEQ ID NO: 2202
  source 1..203: mol_type = other DNA

SEQ ID NO: 29502 - DNA, 203 bp, synthetic construct; identical to SEQ ID NO: 2203
  source 1..203: mol_type = other DNA

SEQ ID NO: 29503 - DNA, 203 bp, synthetic construct; identical to SEQ ID NO: 2204
  source 1..203: mol_type = other DNA

SEQ ID NO: 29504 - DNA, 203 bp, synthetic construct; identical to SEQ ID NO: 2212
  source 1..203: mol_type = other DNA

SEQ ID NO: 29505 - DNA, 203 bp, synthetic construct; identical to SEQ ID NO: 2220
  source 1..203: mol_type = other DNA

SEQ ID NO: 29506 - DNA, 203 bp, synthetic construct; identical to SEQ ID NO: 2221
  source 1..203: mol_type = other DNA

SEQ ID NO: 29507 - DNA, 203 bp, synthetic construct; identical to SEQ ID NO: 2222
  source 1..203: mol_type = other DNA

SEQ ID NO: 29508 - DNA, 203 bp, synthetic construct; identical to SEQ ID NO: 2223
  source 1..203: mol_type = other DNA

SEQ ID NO: 29509 - DNA, 203 bp, synthetic construct; identical to SEQ ID NO: 2228
  source 1..203: mol_type = other DNA

SEQ ID NO: 29510 - DNA, 203 bp, synthetic construct; identical to SEQ ID NO: 2229
  source 1..203: mol_type = other DNA

SEQ ID NO: 29511 - DNA, 203 bp, synthetic construct; identical to SEQ ID NO: 2230
  source 1..203: mol_type = other DNA

SEQ ID NO: 29512 - DNA, 203 bp, synthetic construct; identical to SEQ ID NO: 2234
  source 1..203: mol_type = other DNA

SEQ ID NO: 29513 - DNA, 203 bp, synthetic construct; identical to SEQ ID NO: 2235
  source 1..203: mol_type = other DNA

SEQ ID NO: 29514 - DNA, 203 bp, synthetic construct; identical to SEQ ID NO: 2236
  source 1..203: mol_type = other DNA

SEQ ID NO: 29515 - DNA, 203 bp, synthetic construct; identical to SEQ ID NO: 2241
  source 1..203: mol_type = other DNA

SEQ ID NO: 29516 - DNA, 203 bp, synthetic construct; identical to SEQ ID NO: 2242
  source 1..203: mol_type = other DNA

SEQ ID NO: 29517 - DNA, 203 bp, synthetic construct; identical to SEQ ID NO: 2246
  source 1..203: mol_type = other DNA

SEQ ID NO: 29518 - DNA, 203 bp, synthetic construct; identical to SEQ ID NO: 2253
  source 1..203: mol_type = other DNA

SEQ ID NO: 29519 - DNA, 203 bp, synthetic construct; identical to SEQ ID NO: 2254
  source 1..203: mol_type = other DNA

SEQ ID NO: 29520 - DNA, 203 bp, synthetic construct; identical to SEQ ID NO: 2255
  source 1..203: mol_type = other DNA

SEQ ID NO: 29521 - DNA, 203 bp, synthetic construct; identical to SEQ ID NO: 2261
  source 1..203: mol_type = other DNA

SEQ ID NO: 29522 - DNA, 203 bp, synthetic construct; identical to SEQ ID NO: 2290
  source 1..203: mol_type = other DNA

SEQ ID NO: 29523 - DNA, 203 bp, synthetic construct; identical to SEQ ID NO: 2294
  source 1..203: mol_type = other DNA

SEQ ID NO: 29524 - DNA, 203 bp, synthetic construct; identical to SEQ ID NO: 2298
  source 1..203: mol_type = other DNA

SEQ ID NO: 29525 - DNA, 203 bp, synthetic construct; identical to SEQ ID NO: 2300
  source 1..203: mol_type = other DNA

SEQ ID NO: 29526 - DNA, 203 bp, synthetic construct; identical to SEQ ID NO: 2301
  source 1..203: mol_type = other DNA

SEQ ID NO: 29527 - DNA, 203 bp, synthetic construct; identical to SEQ ID NO: 2309
  source 1..203: mol_type = other DNA

SEQ ID NO: 29528 - DNA, 203 bp, synthetic construct; identical to SEQ ID NO: 2320
  source 1..203: mol_type = other DNA

SEQ ID NO: 29529 - DNA, 203 bp, synthetic construct; identical to SEQ ID NO: 2330
  source 1..203: mol_type = other DNA

SEQ ID NO: 29530 - DNA, 203 bp, synthetic construct; identical to SEQ ID NO: 2336
  source 1..203: mol_type = other DNA

SEQ ID NO: 29531 - DNA, 203 bp, synthetic construct; identical to SEQ ID NO: 2340
  source 1..203: mol_type = other DNA

SEQ ID NO: 29532 - DNA, 203 bp, synthetic construct; identical to SEQ ID NO: 2341
  source 1..203: mol_type = other DNA

SEQ ID NO: 29533 - DNA, 203 bp, synthetic construct; identical to SEQ ID NO: 2342
  source 1..203: mol_type = other DNA

SEQ ID NO: 29534 - DNA, 203 bp, synthetic construct; identical to SEQ ID NO: 2343
  source 1..203: mol_type = other DNA

SEQ ID NO: 29535 - DNA, 203 bp, synthetic construct; identical to SEQ ID NO: 2344
  source 1..203: mol_type = other DNA

SEQ ID NO: 29536 - DNA, 203 bp, synthetic construct; identical to SEQ ID NO: 2345
  source 1..203: mol_type = other DNA

SEQ ID NO: 29537 - DNA, 203 bp, synthetic construct; identical to SEQ ID NO: 2346
  source 1..203: mol_type = other DNA

SEQ ID NO: 29538 - DNA, 203 bp, synthetic construct; identical to SEQ ID NO: 2347
  source 1..203: mol_type = other DNA

SEQ ID NO: 29539 - DNA, 203 bp, synthetic construct; identical to SEQ ID NO: 2348
  source 1..203: mol_type = other DNA

SEQ ID NO: 29540 - DNA, 203 bp, synthetic construct; identical to SEQ ID NO: 2350
  source 1..203: mol_type = other DNA

SEQ ID NO: 29541 - DNA, 203 bp, synthetic construct; identical to SEQ ID NO: 2351
  source 1..203: mol_type = other DNA

SEQ ID NO: 29542 - DNA, 203 bp, synthetic construct; identical to SEQ ID NO: 2352
  source 1..203: mol_type = other DNA

SEQ ID NO: 29543 - DNA, 203 bp, synthetic construct; identical to SEQ ID NO: 2353
  source 1..203: mol_type = other DNA

SEQ ID NO: 29544 - DNA, 203 bp, synthetic construct; identical to SEQ ID NO: 2354
  source 1..203: mol_type = other DNA

SEQ ID NO: 29545 - DNA, 203 bp, synthetic construct; identical to SEQ ID NO: 2357
  source 1..203: mol_type = other DNA

SEQ ID NO: 29546 - DNA, 203 bp, synthetic construct; identical to SEQ ID NO: 2358
  source 1..203: mol_type = other DNA

SEQ ID NO: 29547 - DNA, 203 bp, synthetic construct; identical to SEQ ID NO: 2363
  source 1..203: mol_type = other DNA

SEQ ID NO: 29548 - DNA, 203 bp, synthetic construct; identical to SEQ ID NO: 2366
  source 1..203: mol_type = other DNA

SEQ ID NO: 29549 - DNA, 203 bp, synthetic construct; identical to SEQ ID NO: 2368
  source 1..203: mol_type = other DNA

SEQ ID NO: 29550 - DNA, 203 bp, synthetic construct; identical to SEQ ID NO: 2370
  source 1..203: mol_type = other DNA

SEQ ID NO: 29551 - DNA, 203 bp, synthetic construct; identical to SEQ ID NO: 2371
  source 1..203: mol_type = other DNA

SEQ ID NO: 29552 - DNA, 203 bp, synthetic construct; identical to SEQ ID NO: 2372
  source 1..203: mol_type = other DNA

SEQ ID NO: 29553 - DNA, 203 bp, synthetic construct; identical to SEQ ID NO: 2373
  source 1..203: mol_type = other DNA

SEQ ID NO: 29554 - DNA, 203 bp, synthetic construct; identical to SEQ ID NO: 2374
  source 1..203: mol_type = other DNA

SEQ ID NO: 29555 - DNA, 203 bp, synthetic construct; identical to SEQ ID NO: 2375
  source 1..203: mol_type = other DNA

SEQ ID NO: 29556 - DNA, 203 bp, synthetic construct; identical to SEQ ID NO: 2377
  source 1..203: mol_type = other DNA

SEQ ID NO: 29557 - DNA, 203 bp, synthetic construct; identical to SEQ ID NO: 2393
  source 1..203: mol_type = other DNA

SEQ ID NO: 29558 - DNA, 203 bp, synthetic construct; identical to SEQ ID NO: 2394
  source 1..203: mol_type = other DNA

SEQ ID NO: 29559 - DNA, 203 bp, synthetic construct; identical to SEQ ID NO: 2395
  source 1..203: mol_type = other DNA

SEQ ID NO: 29560 - DNA, 203 bp, synthetic construct; identical to SEQ ID NO: 2396
  source 1..203: mol_type = other DNA

SEQ ID NO: 29561 - DNA, 203 bp, synthetic construct; identical to SEQ ID NO: 2397
  source 1..203: mol_type = other DNA

SEQ ID NO: 29562 - DNA, 203 bp, synthetic construct; identical to SEQ ID NO: 2409
  source 1..203: mol_type = other DNA

SEQ ID NO: 29563 - DNA, 203 bp, synthetic construct; identical to SEQ ID NO: 2414
  source 1..203: mol_type = other DNA

SEQ ID NO: 29564 - DNA, 203 bp, synthetic construct; identical to SEQ ID NO: 2419
  source 1..203: mol_type = other DNA

SEQ ID NO: 29565 - DNA, 203 bp, synthetic construct; identical to SEQ ID NO: 2420
  source 1..203: mol_type = other DNA

SEQ ID NO: 29566 - DNA, 203 bp, synthetic construct; identical to SEQ ID NO: 2421
  source 1..203: mol_type = other DNA

SEQ ID NO: 29567 - DNA, 203 bp, synthetic construct; identical to SEQ ID NO: 2422
  source 1..203: mol_type = other DNA

SEQ ID NO: 29568 - DNA, 203 bp, synthetic construct; identical to SEQ ID NO: 2423
  source 1..203: mol_type = other DNA

SEQ ID NO: 29569 - DNA, 203 bp, synthetic construct; identical to SEQ ID NO: 2424
  source 1..203: mol_type = other DNA

SEQ ID NO: 29570 - DNA, 203 bp, synthetic construct; identical to SEQ ID NO: 2430
  source 1..203: mol_type = other DNA

SEQ ID NO: 29571 - DNA, 203 bp, synthetic construct; identical to SEQ ID NO: 2433
  source 1..203: mol_type = other DNA

SEQ ID NO: 29572 - DNA, 203 bp, synthetic construct; identical to SEQ ID NO: 2440
  source 1..203: mol_type = other DNA

SEQ ID NO: 29573 - DNA, 203 bp, synthetic construct; identical to SEQ ID NO: 2459
  source 1..203: mol_type = other DNA

SEQ ID NO: 29574 - DNA, 203 bp, synthetic construct; identical to SEQ ID NO: 2464
  source 1..203: mol_type = other DNA

SEQ ID NO: 29575 - DNA, 203 bp, synthetic construct; identical to SEQ ID NO: 2475
  source 1..203: mol_type = other DNA

SEQ ID NO: 29576 - DNA, 203 bp, synthetic construct; identical to SEQ ID NO: 2479
  source 1..203: mol_type = other DNA

SEQ ID NO: 29577 - DNA, 203 bp, synthetic construct; identical to SEQ ID NO: 2481
  source 1..203: mol_type = other DNA

SEQ ID NO: 29578 - DNA, 203 bp, synthetic construct; identical to SEQ ID NO: 2482
  source 1..203: mol_type = other DNA

SEQ ID NO: 29579 - DNA, 203 bp, synthetic construct; identical to SEQ ID NO: 2483
  source 1..203: mol_type = other DNA

SEQ ID NO: 29580 - DNA, 203 bp, synthetic construct; identical to SEQ ID NO: 2486
  source 1..203: mol_type = other DNA

SEQ ID NO: 29581 - DNA, 203 bp, synthetic construct; identical to SEQ ID NO: 2489
  source 1..203: mol_type = other DNA

SEQ ID NO: 29582 - DNA, 203 bp, synthetic construct; identical to SEQ ID NO: 2497
  source 1..203: mol_type = other DNA

SEQ ID NO: 29583 - DNA, 203 bp, synthetic construct; identical to SEQ ID NO: 2499
  source 1..203: mol_type = other DNA

SEQ ID NO: 29584 - DNA, 203 bp, synthetic construct; identical to SEQ ID NO: 2511
  source 1..203: mol_type = other DNA

SEQ ID NO: 29585 - DNA, 203 bp, synthetic construct; identical to SEQ ID NO: 2517
  source 1..203: mol_type = other DNA

SEQ ID NO: 29586 - DNA, 203 bp, synthetic construct; identical to SEQ ID NO: 2521
  source 1..203: mol_type = other DNA

SEQ ID NO: 29587 - DNA, 203 bp, synthetic construct; identical to SEQ ID NO: 2522
  source 1..203: mol_type = other DNA

SEQ ID NO: 29588 - DNA, 203 bp, synthetic construct; identical to SEQ ID NO: 2523
  source 1..203: mol_type = other DNA

SEQ ID NO: 29589 - DNA, 203 bp, synthetic construct; identical to SEQ ID NO: 2529
  source 1..203: mol_type = other DNA

SEQ ID NO: 29590 - DNA, 203 bp, synthetic construct; identical to SEQ ID NO: 2533
  source 1..203: mol_type = other DNA

SEQ ID NO: 29591 - DNA, 203 bp, synthetic construct; identical to SEQ ID NO: 2534
  source 1..203: mol_type = other DNA

SEQ ID NO: 29592 - DNA, 203 bp, synthetic construct; identical to SEQ ID NO: 2543
  source 1..203: mol_type = other DNA

SEQ ID NO: 29593 - DNA, 203 bp, synthetic construct; identical to SEQ ID NO: 2544
  source 1..203: mol_type = other DNA

SEQ ID NO: 29594 - DNA, 203 bp, synthetic construct; identical to SEQ ID NO: 2545
  source 1..203: mol_type = other DNA

SEQ ID NO: 29595 - DNA, 203 bp, synthetic construct; identical to SEQ ID NO: 2549
  source 1..203: mol_type = other DNA

SEQ ID NO: 29596 - DNA, 203 bp, synthetic construct; identical to SEQ ID NO: 2557
  source 1..203: mol_type = other DNA

SEQ ID NO: 29597 - DNA, 203 bp, synthetic construct; identical to SEQ ID NO: 2567
  source 1..203: mol_type = other DNA

SEQ ID NO: 29598 - DNA, 203 bp, synthetic construct; identical to SEQ ID NO: 2573
  source 1..203: mol_type = other DNA

SEQ ID NO: 29599 - DNA, 203 bp, synthetic construct; identical to SEQ ID NO: 2579
  source 1..203: mol_type = other DNA

SEQ ID NO: 29600 - DNA, 203 bp, synthetic construct; identical to SEQ ID NO: 2595
  source 1..203: mol_type = other DNA

SEQ ID NO: 29601 - DNA, 203 bp, synthetic construct; identical to SEQ ID NO: 2596
  source 1..203: mol_type = other DNA

SEQ ID NO: 29602 - DNA, 203 bp, synthetic construct; identical to SEQ ID NO: 2597
  source 1..203: mol_type = other DNA

SEQ ID NO: 29603 - DNA, 203 bp, synthetic construct; identical to SEQ ID NO: 2598
  source 1..203: mol_type = other DNA

SEQ ID NO: 29604 - DNA, 203 bp, synthetic construct; identical to SEQ ID NO: 2599
  source 1..203: mol_type = other DNA

SEQ ID NO: 29605 - DNA, 203 bp, synthetic construct; identical to SEQ ID NO: 2600
  source 1..203: mol_type = other DNA

SEQ ID NO: 29606 - DNA, 203 bp, synthetic construct; identical to SEQ ID NO: 2601
  source 1..203: mol_type = other DNA

SEQ ID NO: 29607 - DNA, 203 bp, synthetic construct; identical to SEQ ID NO: 2602
  source 1..203: mol_type = other DNA

SEQ ID NO: 29608 - DNA, 203 bp, synthetic construct; identical to SEQ ID NO: 2603
  source 1..203: mol_type = other DNA

SEQ ID NO: 29609 - DNA, 203 bp, synthetic construct; identical to SEQ ID NO: 2604
  source 1..203: mol_type = other DNA

SEQ ID NO: 29610 - DNA, 203 bp, synthetic construct; identical to SEQ ID NO: 2605
  source 1..203: mol_type = other DNA

SEQ ID NO: 29611 - DNA, 203 bp, synthetic construct; identical to SEQ ID NO: 2606
  source 1..203: mol_type = other DNA

SEQ ID NO: 29612 - DNA, 203 bp, synthetic construct; identical to SEQ ID NO: 2615
  source 1..203: mol_type = other DNA

SEQ ID NO: 29613 - DNA, 203 bp, synthetic construct; identical to SEQ ID NO: 2617
  source 1..203: mol_type = other DNA

SEQ ID NO: 29614 - DNA, 203 bp, synthetic construct; identical to SEQ ID NO: 2620
  source 1..203: mol_type = other DNA

SEQ ID NO: 29615 - DNA, 203 bp, synthetic construct; identical to SEQ ID NO: 2626
  source 1..203: mol_type = other DNA

SEQ ID NO: 29616 - DNA, 203 bp, synthetic construct; identical to SEQ ID NO: 2633
  source 1..203: mol_type = other DNA

SEQ ID NO: 29617 - DNA, 203 bp, synthetic construct; identical to SEQ ID NO: 2634
  source 1..203: mol_type = other DNA

SEQ ID NO: 29618 - DNA, 203 bp, synthetic construct; identical to SEQ ID NO: 2635
  source 1..203: mol_type = other DNA

SEQ ID NO: 29619 - DNA, 203 bp, synthetic construct; identical to SEQ ID NO: 2636
  source 1..203: mol_type = other DNA

SEQ ID NO: 29620 - DNA, 203 bp, synthetic construct; identical to SEQ ID NO: 2637
  source 1..203: mol_type = other DNA

SEQ ID NO: 29621 - DNA, 203 bp, synthetic construct; identical to SEQ ID NO: 2638
  source 1..203: mol_type = other DNA

SEQ ID NO: 29622 - DNA, 203 bp, synthetic construct; identical to SEQ ID NO: 2639
  source 1..203: mol_type = other DNA

SEQ ID NO: 29623 - DNA, 203 bp, synthetic construct; identical to SEQ ID NO: 2640
  source 1..203: mol_type = other DNA

SEQ ID NO: 29624 - DNA, 203 bp, synthetic construct; identical to SEQ ID NO: 2642
  source 1..203: mol_type = other DNA

SEQ ID NO: 29625 - DNA, 203 bp, synthetic construct; identical to SEQ ID NO: 2643
  source 1..203: mol_type = other DNA

SEQ ID NO: 29626 - DNA, 203 bp, synthetic construct; identical to SEQ ID NO: 2644
  source 1..203: mol_type = other DNA

SEQ ID NO: 29627 - DNA, 203 bp, synthetic construct; identical to SEQ ID NO: 2645
  source 1..203: mol_type = other DNA

SEQ ID NO: 29628 - DNA, 203 bp, synthetic construct; identical to SEQ ID NO: 2646
  source 1..203: mol_type = other DNA

SEQ ID NO: 29629 - DNA, 203 bp, synthetic construct; identical to SEQ ID NO: 2647
  source 1..203: mol_type = other DNA

SEQ ID NO: 29630 - DNA, 203 bp, synthetic construct; identical to SEQ ID NO: 2648
  source 1..203: mol_type = other DNA

SEQ ID NO: 29631 - DNA, 203 bp, synthetic construct; identical to SEQ ID NO: 2650
  source 1..203: mol_type = other DNA

SEQ ID NO: 29632 - DNA, 203 bp, synthetic construct; identical to SEQ ID NO: 2651
  source 1..203: mol_type = other DNA

SEQ ID NO: 29633 - DNA, 203 bp, synthetic construct; identical to SEQ ID NO: 2652
  source 1..203: mol_type = other DNA

SEQ ID NO: 29634 - DNA, 203 bp, synthetic construct; identical to SEQ ID NO: 2656
  source 1..203: mol_type = other DNA

SEQ ID NO: 29635 - DNA, 203 bp, synthetic construct; identical to SEQ ID NO: 2657
  source 1..203: mol_type = other DNA

SEQ ID NO: 29636 - DNA, 203 bp, synthetic construct; identical to SEQ ID NO: 2658
  source 1..203: mol_type = other DNA

SEQ ID NO: 29637 - DNA, 203 bp, synthetic construct; identical to SEQ ID NO: 2659
  source 1..203: mol_type = other DNA

SEQ ID NO: 29638 - DNA, 203 bp, synthetic construct; identical to SEQ ID NO: 2660
  source 1..203: mol_type = other DNA

SEQ ID NO: 29639 - DNA, 203 bp, synthetic construct; identical to SEQ ID NO: 2661
  source 1..203: mol_type = other DNA

SEQ ID NO: 29640 - DNA, 203 bp, synthetic construct; identical to SEQ ID NO: 2662
  source 1..203: mol_type = other DNA

SEQ ID NO: 29641 - DNA, 203 bp, synthetic construct; identical to SEQ ID NO: 2663
  source 1..203: mol_type = other DNA

SEQ ID NO: 29642 - DNA, 203 bp, synthetic construct; identical to SEQ ID NO: 2664
  source 1..203: mol_type = other DNA

SEQ ID NO: 29643 - DNA, 203 bp, synthetic construct; identical to SEQ ID NO: 2665
  source 1..203: mol_type = other DNA

SEQ ID NO: 29644 - DNA, 203 bp, synthetic construct; identical to SEQ ID NO: 2666
  source 1..203: mol_type = other DNA

SEQ ID NO: 29645 - DNA, 203 bp, synthetic construct; identical to SEQ ID NO: 2667
  source 1..203: mol_type = other DNA

SEQ ID NO: 29646 - DNA, 203 bp, synthetic construct; identical to SEQ ID NO: 2668
  source 1..203: mol_type = other DNA

SEQ ID NO: 29647 - DNA, 203 bp, synthetic construct; identical to SEQ ID NO: 2669
  source 1..203: mol_type = other DNA

SEQ ID NO: 29648 - DNA, 203 bp, synthetic construct; identical to SEQ ID NO: 2670
  source 1..203: mol_type = other DNA

SEQ ID NO: 29649 - DNA, 203 bp, synthetic construct; identical to SEQ ID NO: 2671
  source 1..203: mol_type = other DNA

SEQ ID NO: 29650 - DNA, 203 bp, synthetic construct; identical to SEQ ID NO: 2672
  source 1..203: mol_type = other DNA

SEQ ID NO: 29651 - DNA, 203 bp, synthetic construct; identical to SEQ ID NO: 2673
  source 1..203: mol_type = other DNA

SEQ ID NO: 29652 - DNA, 203 bp, synthetic construct; identical to SEQ ID NO: 2674
  source 1..203: mol_type = other DNA

SEQ ID NO: 29653 - DNA, 203 bp, synthetic construct; identical to SEQ ID NO: 2675
  source 1..203: mol_type = other DNA

SEQ ID NO: 29654 - DNA, 203 bp, synthetic construct; identical to SEQ ID NO: 2676
  source 1..203: mol_type = other DNA

SEQ ID NO: 29655 - DNA, 203 bp, synthetic construct; identical to SEQ ID NO: 2677
  source 1..203: mol_type = other DNA

SEQ ID NO: 29656 - DNA, 203 bp, synthetic construct; identical to SEQ ID NO: 2678
  source 1..203: mol_type = other DNA

SEQ ID NO: 29657 - DNA, 203 bp, synthetic construct; identical to SEQ ID NO: 2685
  source 1..203: mol_type = other DNA

SEQ ID NO: 29658 - DNA, 203 bp, synthetic construct; identical to SEQ ID NO: 2704
  source 1..203: mol_type = other DNA

SEQ ID NO: 29659 - DNA, 203 bp, synthetic construct; identical to SEQ ID NO: 2715
  source 1..203: mol_type = other DNA

SEQ ID NO: 29660 - DNA, 203 bp, synthetic construct; identical to SEQ ID NO: 2716
  source 1..203: mol_type = other DNA

SEQ ID NO: 29661 - DNA, 203 bp, synthetic construct; identical to SEQ ID NO: 2720
  source 1..203: mol_type = other DNA

SEQ ID NO: 29662 - DNA, 203 bp, synthetic construct; identical to SEQ ID NO: 2728
  source 1..203: mol_type = other DNA

SEQ ID NO: 29663 - DNA, 203 bp, synthetic construct; identical to SEQ ID NO: 2735
  source 1..203: mol_type = other DNA

SEQ ID NO: 29664 - DNA, 203 bp, synthetic construct; identical to SEQ ID NO: 2736
  source 1..203: mol_type = other DNA

SEQ ID NO: 29665 - DNA, 203 bp, synthetic construct; identical to SEQ ID NO: 2737
  source 1..203: mol_type = other DNA

SEQ ID NO: 29666 - DNA, 203 bp, synthetic construct; identical to SEQ ID NO: 2738
  source 1..203: mol_type = other DNA

SEQ ID NO: 29667 - DNA, 203 bp, synthetic construct; identical to SEQ ID NO: 2739
  source 1..203: mol_type = other DNA

SEQ ID NO: 29668 - DNA, 203 bp, synthetic construct; identical to SEQ ID NO: 2741
  source 1..203: mol_type = other DNA

SEQ ID NO: 29669 - DNA, 203 bp, synthetic construct; identical to SEQ ID NO: 2751
  source 1..203: mol_type = other DNA

SEQ ID NO: 29670 - DNA, 203 bp, synthetic construct; identical to SEQ ID NO: 2753
  source 1..203: mol_type = other DNA

SEQ ID NO: 29671 - DNA, 203 bp, synthetic construct; identical to SEQ ID NO: 2754
  source 1..203: mol_type = other DNA

SEQ ID NO: 29672 - DNA, 203 bp, synthetic construct; identical to SEQ ID NO: 2755
  source 1..203: mol_type = other DNA

SEQ ID NO: 29673 - DNA, 203 bp, synthetic construct; identical to SEQ ID NO: 2756
  source 1..203: mol_type = other DNA

SEQ ID NO: 29674 - DNA, 203 bp, synthetic construct; identical to SEQ ID NO: 2757
  source 1..203: mol_type = other DNA

SEQ ID NO: 29675 - DNA, 203 bp, synthetic construct; identical to SEQ ID NO: 2758
  source 1..203: mol_type = other DNA

SEQ ID NO: 29676 - DNA, 203 bp, synthetic construct; identical to SEQ ID NO: 2764
  source 1..203: mol_type = other DNA

SEQ ID NO: 29677 - DNA, 203 bp, synthetic construct; identical to SEQ ID NO: 2771
  source 1..203: mol_type = other DNA

SEQ ID NO: 29678 - DNA, 203 bp, synthetic construct; identical to SEQ ID NO: 2777
  source 1..203: mol_type = other DNA

SEQ ID NO: 29679 - DNA, 203 bp, synthetic construct; identical to SEQ ID NO: 2778
  source 1..203: mol_type = other DNA

SEQ ID NO: 29680 - DNA, 203 bp, synthetic construct; identical to SEQ ID NO: 2783
  source 1..203: mol_type = other DNA

SEQ ID NO: 29681 - DNA, 203 bp, synthetic construct; identical to SEQ ID NO: 2787
  source 1..203: mol_type = other DNA

SEQ ID NO: 29682 - DNA, 203 bp, synthetic construct; identical to SEQ ID NO: 2800
  source 1..203: mol_type = other DNA

SEQ ID NO: 29683 - DNA, 203 bp, synthetic construct; identical to SEQ ID NO: 2801
  source 1..203: mol_type = other DNA

SEQ ID NO: 29684 - DNA, 203 bp, synthetic construct; identical to SEQ ID NO: 2813
  source 1..203: mol_type = other DNA

SEQ ID NO: 29685 - DNA, 203 bp, synthetic construct; identical to SEQ ID NO: 2814
  source 1..203: mol_type = other DNA

SEQ ID NO: 29686 - DNA, 203 bp, synthetic construct; identical to SEQ ID NO: 2815
  source 1..203: mol_type = other DNA

SEQ ID NO: 29687 - DNA, 203 bp, synthetic construct; identical to SEQ ID NO: 2816
  source 1..203: mol_type = other DNA

SEQ ID NO: 29688 - DNA, 203 bp, synthetic construct; identical to SEQ ID NO: 2822
  source 1..203: mol_type = other DNA

SEQ ID NO: 29689 - DNA, 203 bp, synthetic construct; identical to SEQ ID NO: 2825
  source 1..203: mol_type = other DNA

SEQ ID NO: 29690 - DNA, 203 bp, synthetic construct; identical to SEQ ID NO: 2828
  source 1..203: mol_type = other DNA

SEQ ID NO: 29691 - DNA, 203 bp, synthetic construct; identical to SEQ ID NO: 2835
  source 1..203: mol_type = other DNA

SEQ ID NO: 29692 - DNA, 203 bp, synthetic construct; identical to SEQ ID NO: 2836
  source 1..203: mol_type = other DNA

SEQ ID NO: 29693 - DNA, 203 bp, synthetic construct; identical to SEQ ID NO: 2837
  source 1..203: mol_type = other DNA

SEQ ID NO: 29694 - DNA, 203 bp, synthetic construct; identical to SEQ ID NO: 2847
  source 1..203: mol_type = other DNA

SEQ ID NO: 29695 - DNA, 203 bp, synthetic construct; identical to SEQ ID NO: 2848
  source 1..203: mol_type = other DNA

SEQ ID NO: 29696 - DNA, 203 bp, synthetic construct; identical to SEQ ID NO: 2849
  source 1..203: mol_type = other DNA

SEQ ID NO: 29697 - DNA, 203 bp, synthetic construct; identical to SEQ ID NO: 2853
  source 1..203: mol_type = other DNA

SEQ ID NO: 29698 - DNA, 203 bp, synthetic construct; identical to SEQ ID NO: 2876
  source 1..203: mol_type = other DNA

SEQ ID NO: 29699 - DNA, 203 bp, synthetic construct; identical to SEQ ID NO: 2879
  source 1..203: mol_type = other DNA

SEQ ID NO: 29700 - DNA, 203 bp, synthetic construct; identical to SEQ ID NO: 2882
  source 1..203: mol_type = other DNA

SEQ ID NO: 29701 - DNA, 203 bp, synthetic construct; identical to SEQ ID NO: 2883
  source 1..203: mol_type = other DNA

SEQ ID NO: 29702 - DNA, 203 bp, synthetic construct; identical to SEQ ID NO: 2886
  source 1..203: mol_type = other DNA

SEQ ID NO: 29703 - DNA, 203 bp, synthetic construct; identical to SEQ ID NO: 2887
  source 1..203: mol_type = other DNA

SEQ ID NO: 29704 - DNA, 203 bp, synthetic construct; identical to SEQ ID NO: 2890
  source 1..203: mol_type = other DNA

SEQ ID NO: 29705 - DNA, 203 bp, synthetic construct; identical to SEQ ID NO: 2891
  source 1..203: mol_type = other DNA

SEQ ID NO: 29706 - DNA, 203 bp, synthetic construct; identical to SEQ ID NO: 2899
  source 1..203: mol_type = other DNA

SEQ ID NO: 29707 - DNA, 203 bp, synthetic construct; identical to SEQ ID NO: 2900
  source 1..203: mol_type = other DNA

SEQ ID NO: 29708 - DNA, 203 bp, synthetic construct; identical to SEQ ID NO: 2908
  source 1..203: mol_type = other DNA

SEQ ID NO: 29709 - DNA, 203 bp, synthetic construct; identical to SEQ ID NO: 2911
  source 1..203: mol_type = other DNA

SEQ ID NO: 29710 - DNA, 203 bp, synthetic construct; identical to SEQ ID NO: 2914
  source 1..203: mol_type = other DNA

SEQ ID NO: 29711 - DNA, 203 bp, synthetic construct; identical to SEQ ID NO: 2921
  source 1..203: mol_type = other DNA

SEQ ID NO: 29712 - DNA, 203 bp, synthetic construct; identical to SEQ ID NO: 2923
  source 1..203: mol_type = other DNA

SEQ ID NO: 29713 - DNA, 203 bp, synthetic construct; identical to SEQ ID NO: 2924
  source 1..203: mol_type = other DNA

SEQ ID NO: 29714 - DNA, 203 bp, synthetic construct; identical to SEQ ID NO: 2927
  source 1..203: mol_type = other DNA

SEQ ID NO: 29715 - DNA, 203 bp, synthetic construct; identical to SEQ ID NO: 2929
  source 1..203: mol_type = other DNA

SEQ ID NO: 29716 - DNA, 203 bp, synthetic construct; identical to SEQ ID NO: 2935
  source 1..203: mol_type = other DNA

SEQ ID NO: 29717 - DNA, 203 bp, synthetic construct; identical to SEQ ID NO: 2938
  source 1..203: mol_type = other DNA

SEQ ID NO: 29718 - DNA, 203 bp, synthetic construct; identical to SEQ ID NO: 2949
  source 1..203: mol_type = other DNA

SEQ ID NO: 29719 - DNA, 203 bp, synthetic construct; identical to SEQ ID NO: 2950
  source 1..203: mol_type = other DNA

SEQ ID NO: 29720 - DNA, 203 bp, synthetic construct; identical to SEQ ID NO: 2956
  source 1..203: mol_type = other DNA

SEQ ID NO: 29721 - DNA, 203 bp, synthetic construct; identical to SEQ ID NO: 2957
  source 1..203: mol_type = other DNA

SEQ ID NO: 29722 - DNA, 203 bp, synthetic construct; identical to SEQ ID NO: 2962
  source 1..203: mol_type = other DNA

SEQ ID NO: 29723 - DNA, 203 bp, synthetic construct; identical to SEQ ID NO: 2963
  source 1..203: mol_type = other DNA

SEQ ID NO: 29724 - DNA, 203 bp, synthetic construct; identical to SEQ ID NO: 2970
  source 1..203: mol_type = other DNA

SEQ ID NO: 29725 - DNA, 203 bp, synthetic construct; identical to SEQ ID NO: 2971
  source 1..203: mol_type = other DNA

SEQ ID NO: 29726 - DNA, 203 bp, synthetic construct; identical to SEQ ID NO: 2975
  source 1..203: mol_type = other DNA

SEQ ID NO: 29727 - DNA, 203 bp, synthetic construct; identical to SEQ ID NO: 2976
  source 1..203: mol_type = other DNA

SEQ ID NO: 29728 - DNA, 203 bp, synthetic construct; identical to SEQ ID NO: 2980
  source 1..203: mol_type = other DNA

SEQ ID NO: 29729 - DNA, 203 bp, synthetic construct; identical to SEQ ID NO: 2981
  source 1..203: mol_type = other DNA

SEQ ID NO: 29730 - DNA, 203 bp, synthetic construct; identical to SEQ ID NO: 2985
  source 1..203: mol_type = other DNA

SEQ ID NO: 29731 - DNA, 203 bp, synthetic construct; identical to SEQ ID NO: 2988
  source 1..203: mol_type = other DNA

SEQ ID NO: 29732 - DNA, 203 bp, synthetic construct; identical to SEQ ID NO: 2989
  source 1..203: mol_type = other DNA

SEQ ID NO: 29733 - DNA, 203 bp, synthetic construct; identical to SEQ ID NO: 2991
  source 1..203: mol_type = other DNA

SEQ ID NO: 29734 - DNA, 203 bp, synthetic construct; identical to SEQ ID NO: 2994
  source 1..203: mol_type = other DNA

SEQ ID NO: 29735 - DNA, 203 bp, synthetic construct; identical to SEQ ID NO: 3003
  source 1..203: mol_type = other DNA

SEQ ID NO: 29736 - DNA, 203 bp, synthetic construct; identical to SEQ ID NO: 3005
  source 1..203: mol_type = other DNA

SEQ ID NO: 29737 - DNA, 203 bp, synthetic construct; identical to SEQ ID NO: 3006
  source 1..203: mol_type = other DNA

SEQ ID NO: 29738 - DNA, 203 bp, synthetic construct; identical to SEQ ID NO: 3007
  source 1..203: mol_type = other DNA

SEQ ID NO: 29739 - DNA, 203 bp, synthetic construct; identical to SEQ ID NO: 3013
  source 1..203: mol_type = other DNA

SEQ ID NO: 29740 - DNA, 203 bp, synthetic construct; identical to SEQ ID NO: 3016
  source 1..203: mol_type = other DNA

SEQ ID NO: 29741 - DNA, 203 bp, synthetic construct; identical to SEQ ID NO: 3017
  source 1..203: mol_type = other DNA

SEQ ID NO: 29742 - DNA, 203 bp, synthetic construct; identical to SEQ ID NO: 3021
  source 1..203: mol_type = other DNA

SEQ ID NO: 29743 - DNA, 203 bp, synthetic construct; identical to SEQ ID NO: 3022
  source 1..203: mol_type = other DNA

SEQ ID NO: 29744 - DNA, 203 bp, synthetic construct; identical to SEQ ID NO: 3028
  source 1..203: mol_type = other DNA

SEQ ID NO: 29745 - DNA, 203 bp, synthetic construct; identical to SEQ ID NO: 3032
  source 1..203: mol_type = other DNA

SEQ ID NO: 29746 - DNA, 203 bp, synthetic construct; identical to SEQ ID NO: 3033
  source 1..203: mol_type = other DNA

SEQ ID NO: 29747 - DNA, 203 bp, synthetic construct; identical to SEQ ID NO: 3038
  source 1..203: mol_type = other DNA

SEQ ID NO: 29748 - DNA, 203 bp, synthetic construct; identical to SEQ ID NO: 3039
  source 1..203: mol_type = other DNA

SEQ ID NO: 29749 - DNA, 203 bp, synthetic construct; identical to SEQ ID NO: 3046
  source 1..203: mol_type = other DNA

SEQ ID NO: 29750 - DNA, 203 bp, synthetic construct; identical to SEQ ID NO: 3050
  source 1..203: mol_type = other DNA

SEQ ID NO: 29751 - DNA, 203 bp, synthetic construct; identical to SEQ ID NO: 3052
  source 1..203: mol_type = other DNA

SEQ ID NO: 29752 - DNA, 203 bp, synthetic construct; identical to SEQ ID NO: 3063
  source 1..203: mol_type = other DNA

SEQ ID NO: 29753 - DNA, 203 bp, synthetic construct; identical to SEQ ID NO: 3068
  source 1..203: mol_type = other DNA

SEQ ID NO: 29754 - DNA, 203 bp, synthetic construct; identical to SEQ ID NO: 3069
  source 1..203: mol_type = other DNA

SEQ ID NO: 29755 - DNA, 203 bp, synthetic construct; identical to SEQ ID NO: 3071
  source 1..203: mol_type = other DNA

SEQ ID NO: 29756 - DNA, 203 bp, synthetic construct; identical to SEQ ID NO: 3077
  source 1..203: mol_type = other DNA

SEQ ID NO: 29757 - DNA, 203 bp, synthetic construct; identical to SEQ ID NO: 3083
  source 1..203: mol_type = other DNA

SEQ ID NO: 29758 - DNA, 203 bp, synthetic construct; identical to SEQ ID NO: 3084
  source 1..203: mol_type = other DNA

SEQ ID NO: 29759 - DNA, 203 bp, synthetic construct; identical to SEQ ID NO: 3088
  source 1..203: mol_type = other DNA

SEQ ID NO: 29760 - DNA, 203 bp, synthetic construct; identical to SEQ ID NO: 3094
  source 1..203: mol_type = other DNA

SEQ ID NO: 29761 - DNA, 203 bp, synthetic construct; identical to SEQ ID NO: 3095
  source 1..203: mol_type = other DNA

SEQ ID NO: 29762 - DNA, 203 bp, synthetic construct; identical to SEQ ID NO: 3097
  source 1..203: mol_type = other DNA

SEQ ID NO: 29763 - DNA, 203 bp, synthetic construct; identical to SEQ ID NO: 3100
  source 1..203: mol_type = other DNA

SEQ ID NO: 29764 - DNA, 203 bp, synthetic construct; identical to SEQ ID NO: 3101
  source 1..203: mol_type = other DNA

SEQ ID NO: 29765 - DNA, 203 bp, synthetic construct; identical to SEQ ID NO: 3106
  source 1..203: mol_type = other DNA

SEQ ID NO: 29766 - DNA, 203 bp, synthetic construct; identical to SEQ ID NO: 3107
  source 1..203: mol_type = other DNA

SEQ ID NO: 29767 - DNA, 203 bp, synthetic construct; identical to SEQ ID NO: 3108
  source 1..203: mol_type = other DNA

SEQ ID NO: 29768 - DNA, 203 bp, synthetic construct; identical to SEQ ID NO: 3111
  source 1..203: mol_type = other DNA

SEQ ID NO: 29769 - DNA, 203 bp, synthetic construct; identical to SEQ ID NO: 3113
  source 1..203: mol_type = other DNA

SEQ ID NO: 29770 - DNA, 203 bp, synthetic construct; identical to SEQ ID NO: 3116
  source 1..203: mol_type = other DNA

SEQ ID NO: 29771 - DNA, 203 bp, synthetic construct; identical to SEQ ID NO: 3118
  source 1..203: mol_type = other DNA

SEQ ID NO: 29772 - DNA, 203 bp, synthetic construct; identical to SEQ ID NO: 3121
  source 1..203: mol_type = other DNA

SEQ ID NO: 29773 - DNA, 203 bp, synthetic construct; identical to SEQ ID NO: 3123
  source 1..203: mol_type = other DNA

SEQ ID NO: 29774 - DNA, 203 bp, synthetic construct; identical to SEQ ID NO: 3125
  source 1..203: mol_type = other DNA

SEQ ID NO: 29775 - DNA, 203 bp, synthetic construct; identical to SEQ ID NO: 3130
  source 1..203: mol_type = other DNA

SEQ ID NO: 29776 - DNA, 203 bp, synthetic construct; identical to SEQ ID NO: 3134
  source 1..203: mol_type = other DNA

SEQ ID NO: 29777 - DNA, 203 bp, synthetic construct; identical to SEQ ID NO: 3140
  source 1..203: mol_type = other DNA

SEQ ID NO: 29778 - DNA, 203 bp, synthetic construct; identical to SEQ ID NO: 3141
  source 1..203: mol_type = other DNA

SEQ ID NO: 29779 - DNA, 203 bp, synthetic construct; identical to SEQ ID NO: 3145
  source 1..203: mol_type = other DNA

SEQ ID NO: 29780 - DNA, 203 bp, synthetic construct; identical to SEQ ID NO: 3163
  source 1..203: mol_type = other DNA

SEQ ID NO: 29781 - DNA, 203 bp, synthetic construct; identical to SEQ ID NO: 3165
  source 1..203: mol_type = other DNA

SEQ ID NO: 29782 - DNA, 203 bp, synthetic construct; identical to SEQ ID NO: 3168
  source 1..203: mol_type = other DNA

SEQ ID NO: 29783 - DNA, 203 bp, synthetic construct; identical to SEQ ID NO: 3169
  source 1..203: mol_type = other DNA

SEQ ID NO: 29784 - DNA, 203 bp, synthetic construct; identical to SEQ ID NO: 3172
  source 1..203: mol_type = other DNA

SEQ ID NO: 29785 - DNA, 203 bp, synthetic construct; identical to SEQ ID NO: 3173
  source 1..203: mol_type = other DNA

SEQ ID NO: 29786 - DNA, 203 bp, synthetic construct; identical to SEQ ID NO: 3175
  source 1..203: mol_type = other DNA

SEQ ID NO: 29787 - DNA, 203 bp, synthetic construct; identical to SEQ ID NO: 3176
  source 1..203: mol_type = other DNA

SEQ ID NO: 29788 - DNA, 203 bp, synthetic construct; identical to SEQ ID NO: 3185
  source 1..203: mol_type = other DNA

SEQ ID NO: 29789 - DNA, 203 bp, synthetic construct; identical to SEQ ID NO: 3186
  source 1..203: mol_type = other DNA

SEQ ID NO: 29790 - DNA, 203 bp, synthetic construct; identical to SEQ ID NO: 3187
  source 1..203: mol_type = other DNA

SEQ ID NO: 29791 - DNA, 203 bp, synthetic construct; identical to SEQ ID NO: 3188
  source 1..203: mol_type = other DNA

SEQ ID NO: 29792 - DNA, 203 bp, synthetic construct; identical to SEQ ID NO: 3197
  source 1..203: mol_type = other DNA

SEQ ID NO: 29793 - DNA, 203 bp, synthetic construct; identical to SEQ ID NO: 3199
  source 1..203: mol_type = other DNA

SEQ ID NO: 29794 - DNA, 203 bp, synthetic construct; identical to SEQ ID NO: 3203
  source 1..203: mol_type = other DNA

SEQ ID NO: 29795 - DNA, 203 bp, synthetic construct; identical to SEQ ID NO: 3208
  source 1..203: mol_type = other DNA

SEQ ID NO: 29796 - DNA, 203 bp, synthetic construct; identical to SEQ ID NO: 3211
  source 1..203: mol_type = other DNA

SEQ ID NO: 29797 - DNA, 203 bp, synthetic construct; identical to SEQ ID NO: 3213
  source 1..203: mol_type = other DNA

SEQ ID NO: 29798 - DNA, 203 bp, synthetic construct; identical to SEQ ID NO: 3216
  source 1..203: mol_type = other DNA

SEQ ID NO: 29799 - DNA, 203 bp, synthetic construct; identical to SEQ ID NO: 3218
  source 1..203: mol_type = other DNA

SEQ ID NO: 29800 - DNA, 203 bp, synthetic construct; identical to SEQ ID NO: 3219
  source 1..203: mol_type = other DNA

SEQ ID NO: 29801 - DNA, 203 bp, synthetic construct; identical to SEQ ID NO: 3224
  source 1..203: mol_type = other DNA

SEQ ID NO: 29802 - DNA, 203 bp, synthetic construct; identical to SEQ ID NO: 3230
  source 1..203: mol_type = other DNA

SEQ ID NO: 29803 - DNA, 203 bp, synthetic construct; identical to SEQ ID NO: 3231
  source 1..203: mol_type = other DNA

SEQ ID NO: 29804 - DNA, 203 bp, synthetic construct; identical to SEQ ID NO: 3233
  source 1..203: mol_type = other DNA

SEQ ID NO: 29805 - DNA, 203 bp, synthetic construct; identical to SEQ ID NO: 3235
  source 1..203: mol_type = other DNA

SEQ ID NO: 29806 - DNA, 203 bp, synthetic construct; identical to SEQ ID NO: 3252
  source 1..203: mol_type = other DNA

SEQ ID NO: 29807 - DNA, 203 bp, synthetic construct; identical to SEQ ID NO: 3265
  source 1..203: mol_type = other DNA

SEQ ID NO: 29808 - DNA, 203 bp, synthetic construct; identical to SEQ ID NO: 3269
  source 1..203: mol_type = other DNA

SEQ ID NO: 29809 - DNA, 203 bp, synthetic construct; identical to SEQ ID NO: 3270
  source 1..203: mol_type = other DNA

SEQ ID NO: 29810 - DNA, 203 bp, synthetic construct; identical to SEQ ID NO: 3271
  source 1..203: mol_type = other DNA

SEQ ID NO: 29811 - DNA, 203 bp, synthetic construct; identical to SEQ ID NO: 3272
  source 1..203: mol_type = other DNA

SEQ ID NO: 29812 - DNA, 203 bp, synthetic construct; identical to SEQ ID NO: 3279
  source 1..203: mol_type = other DNA

SEQ ID NO: 29813 - DNA, 203 bp, synthetic construct; identical to SEQ ID NO: 3282
  source 1..203: mol_type = other DNA

SEQ ID NO: 29814 - DNA, 203 bp, synthetic construct; identical to SEQ ID NO: 3284
  source 1..203: mol_type = other DNA

SEQ ID NO: 29815 - DNA, 203 bp, synthetic construct; identical to SEQ ID NO: 3286
  source 1..203: mol_type = other DNA

SEQ ID NO: 29816 - DNA, 203 bp, synthetic construct; identical to SEQ ID NO: 3287
  source 1..203: mol_type = other DNA

SEQ ID NO: 29817 - DNA, 203 bp, synthetic construct; identical to SEQ ID NO: 3291
  source 1..203: mol_type = other DNA

SEQ ID NO: 29818 - DNA, 203 bp, synthetic construct; identical to SEQ ID NO: 3292
  source 1..203: mol_type = other DNA

SEQ ID NO: 29819 - DNA, 203 bp, synthetic construct; identical to SEQ ID NO: 3294
  source 1..203: mol_type = other DNA

SEQ ID NO: 29820 - DNA, 203 bp, synthetic construct; identical to SEQ ID NO: 3299
  source 1..203: mol_type = other DNA

SEQ ID NO: 29821 - DNA, 203 bp, synthetic construct; identical to SEQ ID NO: 3302
  source 1..203: mol_type = other DNA

SEQ ID NO: 29822 - DNA, 203 bp, synthetic construct; identical to SEQ ID NO: 3303
  source 1..203: mol_type = other DNA

SEQ ID NO: 29823 - DNA, 203 bp, synthetic construct; identical to SEQ ID NO: 3310
  source 1..203: mol_type = other DNA

SEQ ID NO: 29824 - DNA, 203 bp, synthetic construct; identical to SEQ ID NO: 3311
  source 1..203: mol_type = other DNA

SEQ ID NO: 29825 - DNA, 203 bp, synthetic construct; identical to SEQ ID NO: 3315
  source 1..203: mol_type = other DNA

SEQ ID NO: 29826 - DNA, 203 bp, synthetic construct; identical to SEQ ID NO: 3318
  source 1..203: mol_type = other DNA

SEQ ID NO: 29827 - DNA, 203 bp, synthetic construct; identical to SEQ ID NO: 3320
  source 1..203: mol_type = other DNA

SEQ ID NO: 29828 - DNA, 203 bp, synthetic construct; identical to SEQ ID NO: 3323
  source 1..203: mol_type = other DNA

SEQ ID NO: 29829 - DNA, 203 bp, synthetic construct; identical to SEQ ID NO: 3325
  source 1..203: mol_type = other DNA

SEQ ID NO: 29830 - DNA, 203 bp, synthetic construct; identical to SEQ ID NO: 3328
  source 1..203: mol_type = other DNA

SEQ ID NO: 29831 - DNA, 203 bp, synthetic construct; identical to SEQ ID NO: 3336
  source 1..203: mol_type = other DNA

SEQ ID NO: 29832 - DNA, 203 bp, synthetic construct; identical to SEQ ID NO: 3338
  source 1..203: mol_type = other DNA

SEQ ID NO: 29833 - DNA, 203 bp, synthetic construct; identical to SEQ ID NO: 3341
  source 1..203: mol_type = other DNA

SEQ ID NO: 29834 - DNA, 203 bp, synthetic construct; identical to SEQ ID NO: 3345
  source 1..203: mol_type = other DNA

SEQ ID NO: 29835 - DNA, 203 bp, synthetic construct; identical to SEQ ID NO: 3352
  source 1..203: mol_type = other DNA

SEQ ID NO: 29836 - DNA, 203 bp, synthetic construct; identical to SEQ ID NO: 3358
  source 1..203: mol_type = other DNA

SEQ ID NO: 29837 - DNA, 203 bp, synthetic construct; identical to SEQ ID NO: 3359
  source 1..203: mol_type = other DNA

SEQ ID NO: 29838 - DNA, 203 bp, synthetic construct; identical to SEQ ID NO: 3360
  source 1..203: mol_type = other DNA

SEQ ID NO: 29839 - DNA, 203 bp, synthetic construct; identical to SEQ ID NO: 3369
  source 1..203: mol_type = other DNA

SEQ ID NO: 29840 - DNA, 203 bp, synthetic construct; identical to SEQ ID NO: 3370
  source 1..203: mol_type = other DNA

SEQ ID NO: 29841 - DNA, 203 bp, synthetic construct; identical to SEQ ID NO: 3373
  source 1..203: mol_type = other DNA

SEQ ID NO: 29842 - DNA, 203 bp, synthetic construct; identical to SEQ ID NO: 3377
  source 1..203: mol_type = other DNA

SEQ ID NO: 29843 - DNA, 203 bp, synthetic construct; identical to SEQ ID NO: 3396
  source 1..203: mol_type = other DNA

SEQ ID NO: 29844 - DNA, 203 bp, synthetic construct; identical to SEQ ID NO: 3404
  source 1..203: mol_type = other DNA

SEQ ID NO: 29845 - DNA, 203 bp, synthetic construct; identical to SEQ ID NO: 3420
  source 1..203: mol_type = other DNA

SEQ ID NO: 29846 - DNA, 203 bp, synthetic construct; identical to SEQ ID NO: 3428
  source 1..203: mol_type = other DNA

SEQ ID NO: 29847 - DNA, 203 bp, synthetic construct; identical to SEQ ID NO: 3429
  source 1..203: mol_type = other DNA

SEQ ID NO: 29848 - DNA, 203 bp, synthetic construct; identical to SEQ ID NO: 3466
  source 1..203: mol_type = other DNA

SEQ ID NO: 29849 - DNA, 203 bp, synthetic construct; identical to SEQ ID NO: 3486
  source 1..203: mol_type = other DNA

SEQ ID NO: 29850 - DNA, 203 bp, synthetic construct; identical to SEQ ID NO: 3488
  source 1..203: mol_type = other DNA

SEQ ID NO: 29851 - DNA, 203 bp, synthetic construct; identical to SEQ ID NO: 3491
  source 1..203: mol_type = other DNA

SEQ ID NO: 29852 - DNA, 203 bp, synthetic construct; identical to SEQ ID NO: 3493
  source 1..203: mol_type = other DNA

SEQ ID NO: 29853 - DNA, 203 bp, synthetic construct; identical to SEQ ID NO: 3496
  source 1..203: mol_type = other DNA

SEQ ID NO: 29854 - DNA, 203 bp, synthetic construct; identical to SEQ ID NO: 3502
  source 1..203: mol_type = other DNA

SEQ ID NO: 29855 - DNA, 203 bp, synthetic construct; identical to SEQ ID NO: 3503
  source 1..203: mol_type = other DNA

SEQ ID NO: 29856 - DNA, 203 bp, synthetic construct; identical to SEQ ID NO: 3509
  source 1..203: mol_type = other DNA

SEQ ID NO: 29857 - DNA, 203 bp, synthetic construct; identical to SEQ ID NO: 3513
  source 1..203: mol_type = other DNA

SEQ ID NO: 29858 - DNA, 203 bp, synthetic construct; identical to SEQ ID NO: 3525
  source 1..203: mol_type = other DNA

SEQ ID NO: 29859 - DNA, 203 bp, synthetic construct; identical to SEQ ID NO: 3538
  source 1..203: mol_type = other DNA

SEQ ID NO: 29860 - DNA, 203 bp, synthetic construct; identical to SEQ ID NO: 3540
  source 1..203: mol_type = other DNA

SEQ ID NO: 29861 - DNA, 203 bp, synthetic construct; identical to SEQ ID NO: 3541
  source 1..203: mol_type = other DNA

SEQ ID NO: 29862 - DNA, 203 bp, synthetic construct; identical to SEQ ID NO: 3542
  source 1..203: mol_type = other DNA

SEQ ID NO: 29863 - DNA, 203 bp, synthetic construct; identical to SEQ ID NO: 3548
  source 1..203: mol_type = other DNA

SEQ ID NO: 29864 - DNA, 203 bp, synthetic construct; identical to SEQ ID NO: 3551
  source 1..203: mol_type = other DNA

SEQ ID NO: 29865 - DNA, 203 bp, synthetic construct; identical to SEQ ID NO: 3553
  source 1..203: mol_type = other DNA

SEQ ID NO: 29866 - DNA, 203 bp, synthetic construct; identical to SEQ ID NO: 3555
  source 1..203: mol_type = other DNA

SEQ ID NO: 29867 - DNA, 203 bp, synthetic construct; identical to SEQ ID NO: 3557
  source 1..203: mol_type = other DNA

SEQ ID NO: 29868 - DNA, 203 bp, synthetic construct; identical to SEQ ID NO: 3569
  source 1..203: mol_type = other DNA

SEQ ID NO: 29869 - DNA, 203 bp, synthetic construct; identical to SEQ ID NO: 3576
  source 1..203: mol_type = other DNA

SEQ ID NO: 29870 - DNA, 203 bp, synthetic construct; identical to SEQ ID NO: 3586
  source 1..203: mol_type = other DNA

SEQ ID NO: 29871 - DNA, 203 bp, synthetic construct; identical to SEQ ID NO: 3591
  source 1..203: mol_type = other DNA

SEQ ID NO: 29872 - DNA, 203 bp, synthetic construct; identical to SEQ ID NO: 3597
  source 1..203: mol_type = other DNA

SEQ ID NO: 29873 - DNA, 203 bp, synthetic construct; identical to SEQ ID NO: 3605
  source 1..203: mol_type = other DNA

SEQ ID NO: 29874 - DNA, 203 bp, synthetic construct; identical to SEQ ID NO: 3611
  source 1..203: mol_type = other DNA

SEQ ID NO: 29875 - DNA, 203 bp, synthetic construct; identical to SEQ ID NO: 3615
  source 1..203: mol_type = other DNA

SEQ ID NO: 29876 - DNA, 203 bp, synthetic construct; identical to SEQ ID NO: 3618
  source 1..203: mol_type = other DNA

SEQ ID NO: 29877 - DNA, 203 bp, synthetic construct; identical to SEQ ID NO: 3627
  source 1..203: mol_type = other DNA

SEQ ID NO: 29878 - DNA, 203 bp, synthetic construct; identical to SEQ ID NO: 3628
  source 1..203: mol_type = other DNA

SEQ ID NO: 29879 - DNA, 203 bp, synthetic construct; identical to SEQ ID NO: 3629
  source 1..203: mol_type = other DNA

SEQ ID NO: 29880 - DNA, 203 bp, synthetic construct; identical to SEQ ID NO: 3633
  source 1..203: mol_type = other DNA

SEQ ID NO: 29881 - DNA, 203 bp, synthetic construct; identical to SEQ ID NO: 3634
  source 1..203: mol_type = other DNA

SEQ ID NO: 29882 - DNA, 203 bp, synthetic construct; identical to SEQ ID NO: 3637
  source 1..203: mol_type = other DNA

SEQ ID NO: 29883 - DNA, 203 bp, synthetic construct; identical to SEQ ID NO: 3639
  source 1..203: mol_type = other DNA

SEQ ID NO: 29884 - DNA, 203 bp, synthetic construct; identical to SEQ ID NO: 3641
  source 1..203: mol_type = other DNA

SEQ ID NO: 29885 - DNA, 203 bp, synthetic construct; identical to SEQ ID NO: 3655
  source 1..203: mol_type = other DNA

SEQ ID NO: 29886 - DNA, 203 bp, synthetic construct; identical to SEQ ID NO: 3662
  source 1..203: mol_type = other DNA

SEQ ID NO: 29887 - DNA, 203 bp, synthetic construct; identical to SEQ ID NO: 3663
  source 1..203: mol_type = other DNA

SEQ ID NO: 29888 - DNA, 203 bp, synthetic construct; identical to SEQ ID NO: 3673
  source 1..203: mol_type = other DNA

SEQ ID NO: 29889 - DNA, 203 bp, synthetic construct; identical to SEQ ID NO: 3674
  source 1..203: mol_type = other DNA

SEQ ID NO: 29890 - DNA, 203 bp, synthetic construct; identical to SEQ ID NO: 3676
  source 1..203: mol_type = other DNA

SEQ ID NO: 29891 - DNA, 203 bp, synthetic construct; identical to SEQ ID NO: 3677
  source 1..203: mol_type = other DNA

SEQ ID NO: 29892 - DNA, 203 bp, synthetic construct; identical to SEQ ID NO: 3701
  source 1..203: mol_type = other DNA

SEQ ID NO: 29893 - DNA, 203 bp, synthetic construct; identical to SEQ ID NO: 3702
  source 1..203: mol_type = other DNA

SEQ ID NO: 29894 - DNA, 203 bp, synthetic construct; identical to SEQ ID NO: 3703
  source 1..203: mol_type = other DNA

SEQ ID NO: 29895 - DNA, 203 bp, synthetic construct; identical to SEQ ID NO: 3706
  source 1..203: mol_type = other DNA

SEQ ID NO: 29896 - DNA, 203 bp, synthetic construct; identical to SEQ ID NO: 3710
  source 1..203: mol_type = other DNA

SEQ ID NO: 29897 - DNA, 203 bp, synthetic construct; identical to SEQ ID NO: 3720
  source 1..203: mol_type = other DNA

SEQ ID NO: 29898 - DNA, 203 bp, synthetic construct; identical to SEQ ID NO: 3727
  source 1..203: mol_type = other DNA

SEQ ID NO: 29899 - DNA, 203 bp, synthetic construct; identical to SEQ ID NO: 3733
  source 1..203: mol_type = other DNA

SEQ ID NO: 29900 - DNA, 203 bp, synthetic construct; identical to SEQ ID NO: 3744
  source 1..203: mol_type = other DNA

SEQ ID NO: 29901 - DNA, 203 bp, synthetic construct; identical to SEQ ID NO: 3758
  source 1..203: mol_type = other DNA

SEQ ID NO: 29902 - DNA, 203 bp, synthetic construct; identical to SEQ ID NO: 3771
  source 1..203: mol_type = other DNA

SEQ ID NO: 29903 - DNA, 203 bp, synthetic construct; identical to SEQ ID NO: 3773
  source 1..203: mol_type = other DNA

SEQ ID NO: 29904 - DNA, 203 bp, synthetic construct; identical to SEQ ID NO: 3774
  source 1..203: mol_type = other DNA

SEQ ID NO: 29905 - DNA, 203 bp, synthetic construct; identical to SEQ ID NO: 3775
  source 1..203: mol_type = other DNA

SEQ ID NO: 29906 - DNA, 203 bp, synthetic construct; identical to SEQ ID NO: 3777
  source 1..203: mol_type = other DNA

SEQ ID NO: 29907 - DNA, 203 bp, synthetic construct; identical to SEQ ID NO: 3781
  source 1..203: mol_type = other DNA

SEQ ID NO: 29908 - DNA, 203 bp, synthetic construct; identical to SEQ ID NO: 3782
  source 1..203: mol_type = other DNA

SEQ ID NO: 29909 - DNA, 203 bp, synthetic construct; identical to SEQ ID NO: 3785
  source 1..203: mol_type = other DNA

SEQ ID NO: 29910 - DNA, 203 bp, synthetic construct; identical to SEQ ID NO: 3790
  source 1..203: mol_type = other DNA

SEQ ID NO: 29911 - DNA, 203 bp, synthetic construct; identical to SEQ ID NO: 3792
  source 1..203: mol_type = other DNA

SEQ ID NO: 29912 - DNA, 203 bp, synthetic construct; identical to SEQ ID NO: 3793
  source 1..203: mol_type = other DNA

SEQ ID NO: 29913 - DNA, 203 bp, synthetic construct; identical to SEQ ID NO: 3796
  source 1..203: mol_type = other DNA

SEQ ID NO: 29914 - DNA, 203 bp, synthetic construct; identical to SEQ ID NO: 3797
  source 1..203: mol_type = other DNA

SEQ ID NO: 29915 - DNA, 203 bp, synthetic construct; identical to SEQ ID NO: 3798
  source 1..203: mol_type = other DNA

SEQ ID NO: 29916 - DNA, 203 bp, synthetic construct; identical to SEQ ID NO: 3799
  source 1..203: mol_type = other DNA

SEQ ID NO: 29917 - DNA, 203 bp, synthetic construct; identical to SEQ ID NO: 3800
  source 1..203: mol_type = other DNA

SEQ ID NO: 29918 - DNA, 203 bp, synthetic construct; identical to SEQ ID NO: 3801
  source 1..203: mol_type = other DNA

SEQ ID NO: 29919 - DNA, 203 bp, synthetic construct; identical to SEQ ID NO: 3804
  source 1..203: mol_type = other DNA

SEQ ID NO: 29920 - DNA, 203 bp, synthetic construct; identical to SEQ ID NO: 3806
  source 1..203: mol_type = other DNA

SEQ ID NO: 29921 - DNA, 203 bp, synthetic construct; identical to SEQ ID NO: 3807
  source 1..203: mol_type = other DNA

SEQ ID NO: 29922 - DNA, 203 bp, synthetic construct; identical to SEQ ID NO: 3808
  source 1..203: mol_type = other DNA

SEQ ID NO: 29923 - DNA, 203 bp, synthetic construct; identical to SEQ ID NO: 3809
  source 1..203: mol_type = other DNA

SEQ ID NO: 29924 - DNA, 203 bp, synthetic construct; identical to SEQ ID NO: 3811
  source 1..203: mol_type = other DNA

SEQ ID NO: 29925 - DNA, 203 bp, synthetic construct; identical to SEQ ID NO: 3812
  source 1..203: mol_type = other DNA

SEQ ID NO: 29926 - DNA, 203 bp, synthetic construct; identical to SEQ ID NO: 3813
  source 1..203: mol_type = other DNA

SEQ ID NO: 29927 - DNA, 203 bp, synthetic construct; identical to SEQ ID NO: 3814
  source 1..203: mol_type = other DNA

SEQ ID NO: 29928 - DNA, 203 bp, synthetic construct; identical to SEQ ID NO: 3826
  source 1..203: mol_type = other DNA

SEQ ID NO: 29929 - DNA, 203 bp, synthetic construct; identical to SEQ ID NO: 3827
  source 1..203: mol_type = other DNA

SEQ ID NO: 29930 - DNA, 203 bp, synthetic construct; identical to SEQ ID NO: 3828
  source 1..203: mol_type = other DNA

SEQ ID NO: 29931 - DNA, 203 bp, synthetic construct; identical to SEQ ID NO: 3831
  source 1..203: mol_type = other DNA

SEQ ID NO: 29932 - DNA, 203 bp, synthetic construct; identical to SEQ ID NO: 3836
  source 1..203: mol_type = other DNA

SEQ ID NO: 29933 - DNA, 203 bp, synthetic construct; identical to SEQ ID NO: 3837
  source 1..203: mol_type = other DNA

SEQ ID NO: 29934 - DNA, 203 bp, synthetic construct; identical to SEQ ID NO: 3839
  source 1..203: mol_type = other DNA

SEQ ID NO: 29935 - DNA, 203 bp, synthetic construct; identical to SEQ ID NO: 3846
  source 1..203: mol_type = other DNA

SEQ ID NO: 29936 - DNA, 203 bp, synthetic construct; identical to SEQ ID NO: 3847
  source 1..203: mol_type = other DNA

SEQ ID NO: 29937 - DNA, 203 bp, synthetic construct; identical to SEQ ID NO: 3851
  source 1..203: mol_type = other DNA

SEQ ID NO: 29938 - DNA, 203 bp, synthetic construct; identical to SEQ ID NO: 3852
  source 1..203: mol_type = other DNA

SEQ ID NO: 29939 - DNA, 203 bp, synthetic construct; identical to SEQ ID NO: 3853
  source 1..203: mol_type = other DNA

SEQ ID NO: 29940 - DNA, 203 bp, synthetic construct; identical to SEQ ID NO: 3856
  source 1..203: mol_type = other DNA

SEQ ID NO: 29941 - DNA, 203 bp, synthetic construct; identical to SEQ ID NO: 3861
  source 1..203: mol_type = other DNA

SEQ ID NO: 29942 - DNA, 203 bp, synthetic construct; identical to SEQ ID NO: 3862
  source 1..203: mol_type = other DNA

SEQ ID NO: 29943 - DNA, 203 bp, synthetic construct; identical to SEQ ID NO: 3871
  source 1..203: mol_type = other DNA

SEQ ID NO: 29944 - DNA, 203 bp, synthetic construct; identical to SEQ ID NO: 3872
  source 1..203: mol_type = other DNA

SEQ ID NO: 29945 - DNA, 203 bp, synthetic construct; identical to SEQ ID NO: 3874
  source 1..203: mol_type = other DNA

SEQ ID NO: 29946 - DNA, 203 bp, synthetic construct; identical to SEQ ID NO: 3875
  source 1..203: mol_type = other DNA

SEQ ID NO: 29947 - DNA, 203 bp, synthetic construct; identical to SEQ ID NO: 3876
  source 1..203: mol_type = other DNA

SEQ ID NO: 29948 - DNA, 203 bp, synthetic construct; identical to SEQ ID NO: 3877
  source 1..203: mol_type = other DNA

SEQ ID NO: 29949 - DNA, 203 bp, synthetic construct; identical to SEQ ID NO: 3880
  source 1..203: mol_type = other DNA

SEQ ID NO: 29950 - DNA, 203 bp, synthetic construct; identical to SEQ ID NO: 3881
  source 1..203: mol_type = other DNA

SEQ ID NO: 29951 - DNA, 203 bp, synthetic construct; identical to SEQ ID NO: 3883
  source 1..203: mol_type = other DNA

SEQ ID NO: 29952 - DNA, 203 bp, synthetic construct; identical to SEQ ID NO: 3886
  source 1..203: mol_type = other DNA

SEQ ID NO: 29953 - DNA, 203 bp, synthetic construct; identical to SEQ ID NO: 3887
  source 1..203: mol_type = other DNA

SEQ ID NO: 29954 - DNA, 203 bp, synthetic construct; identical to SEQ ID NO: 3888
  source 1..203: mol_type = other DNA

SEQ ID NO: 29955 - DNA, 203 bp, synthetic construct; identical to SEQ ID NO: 3889
  source 1..203: mol_type = other DNA

SEQ ID NO: 29956 - DNA, 203 bp, synthetic construct; identical to SEQ ID NO: 3894
  source 1..203: mol_type = other DNA

SEQ ID NO: 29957 - DNA, 203 bp, synthetic construct; identical to SEQ ID NO: 3896
  source 1..203: mol_type = other DNA

SEQ ID NO: 29958 - DNA, 203 bp, synthetic construct; identical to SEQ ID NO: 3897
  source 1..203: mol_type = other DNA

SEQ ID NO: 29959 - DNA, 203 bp, synthetic construct; identical to SEQ ID NO: 3908
  source 1..203: mol_type = other DNA

SEQ ID NO: 29960 - DNA, 203 bp, synthetic construct; identical to SEQ ID NO: 3909
  source 1..203: mol_type = other DNA

SEQ ID NO: 29961 - DNA, 203 bp, synthetic construct; identical to SEQ ID NO: 3914
  source 1..203: mol_type = other DNA

SEQ ID NO: 29962 - DNA, 203 bp, synthetic construct; identical to SEQ ID NO: 3915
  source 1..203: mol_type = other DNA

SEQ ID NO: 29963 - DNA, 203 bp, synthetic construct; identical to SEQ ID NO: 3926
  source 1..203: mol_type = other DNA

SEQ ID NO: 29964 - DNA, 203 bp, synthetic construct; identical to SEQ ID NO: 3929
  source 1..203: mol_type = other DNA

SEQ ID NO: 29965 - DNA, 203 bp, synthetic construct; identical to SEQ ID NO: 3931
  source 1..203: mol_type = other DNA

SEQ ID NO: 29966 - DNA, 203 bp, synthetic construct; identical to SEQ ID NO: 3933
  source 1..203: mol_type = other DNA

SEQ ID NO: 29967 - DNA, 203 bp, synthetic construct; identical to SEQ ID NO: 3934
  source 1..203: mol_type = other DNA

SEQ ID NO: 29968 - DNA, 203 bp, synthetic construct; identical to SEQ ID NO: 3937
  source 1..203: mol_type = other DNA

SEQ ID NO: 29969 - DNA, 203 bp, synthetic construct; identical to SEQ ID NO: 3949
  source 1..203: mol_type = other DNA

SEQ ID NO: 29970 - DNA, 203 bp, synthetic construct; identical to SEQ ID NO: 3958
  source 1..203: mol_type = other DNA

SEQ ID NO: 29971 - DNA, 203 bp, synthetic construct; identical to SEQ ID NO: 3967
  source 1..203: mol_type = other DNA

SEQ ID NO: 29972 - DNA, 203 bp, synthetic construct; identical to SEQ ID NO: 3969
  source 1..203: mol_type = other DNA

SEQ ID NO: 29973 - DNA, 203 bp, synthetic construct; identical to SEQ ID NO: 3970
  source 1..203: mol_type = other DNA

SEQ ID NO: 29974 - DNA, 203 bp, synthetic construct; identical to SEQ ID NO: 3972
  source 1..203: mol_type = other DNA

SEQ ID NO: 29975 - DNA, 203 bp, synthetic construct; identical to SEQ ID NO: 3976
  source 1..203: mol_type = other DNA

SEQ ID NO: 29976 - DNA, 203 bp, synthetic construct; identical to SEQ ID NO: 3977
  source 1..203: mol_type = other DNA

SEQ ID NO: 29977 - DNA, 203 bp, synthetic construct; identical to SEQ ID NO: 3980
  source 1..203: mol_type = other DNA

SEQ ID NO: 29978 - DNA, 203 bp, synthetic construct; identical to SEQ ID NO: 3989
  source 1..203: mol_type = other DNA

SEQ ID NO: 29979 - DNA, 203 bp, synthetic construct; identical to SEQ ID NO: 3990
  source 1..203: mol_type = other DNA

SEQ ID NO: 29980 - DNA, 203 bp, synthetic construct; identical to SEQ ID NO: 3992
  source 1..203: mol_type = other DNA

SEQ ID NO: 29981 - DNA, 203 bp, synthetic construct; identical to SEQ ID NO: 3993
  source 1..203: mol_type = other DNA

SEQ ID NO: 29982 - DNA, 203 bp, synthetic construct; identical to SEQ ID NO: 4006
  source 1..203: mol_type = other DNA

SEQ ID NO: 29983 - DNA, 203 bp, synthetic construct; identical to SEQ ID NO: 4008
  source 1..203: mol_type = other DNA

SEQ ID NO: 29984 - DNA, 203 bp, synthetic construct; identical to SEQ ID NO: 4017
  source 1..203: mol_type = other DNA

SEQ ID NO: 29985 - DNA, 203 bp, synthetic construct; identical to SEQ ID NO: 4021
  source 1..203: mol_type = other DNA

SEQ ID NO: 29986 - DNA, 203 bp, synthetic construct; identical to SEQ ID NO: 4022
  source 1..203: mol_type = other DNA

SEQ ID NO: 29987 - DNA, 203 bp, synthetic construct; identical to SEQ ID NO: 4023
  source 1..203: mol_type = other DNA

SEQ ID NO: 29988 - DNA, 203 bp, synthetic construct; identical to SEQ ID NO: 4030
  source 1..203: mol_type = other DNA

SEQ ID NO: 29989 - DNA, 203 bp, synthetic construct; identical to SEQ ID NO: 4041
  source 1..203: mol_type = other DNA

SEQ ID NO: 29990 - DNA, 203 bp, synthetic construct; identical to SEQ ID NO: 4057
  source 1..203: mol_type = other DNA

SEQ ID NO: 29991 - DNA, 203 bp, synthetic construct; identical to SEQ ID NO: 4059
  source 1..203: mol_type = other DNA

SEQ ID NO: 29992 - DNA, 203 bp, synthetic construct; identical to SEQ ID NO: 4065
  source 1..203: mol_type = other DNA

SEQ ID NO: 29993 - DNA, 203 bp, synthetic construct; identical to SEQ ID NO: 4068
  source 1..203: mol_type = other DNA

SEQ ID NO: 29994 - DNA, 203 bp, synthetic construct; identical to SEQ ID NO: 4069
  source 1..203: mol_type = other DNA

SEQ ID NO: 29995 - DNA, 203 bp, synthetic construct; identical to SEQ ID NO: 4087
  source 1..203: mol_type = other DNA

SEQ ID NO: 29996 - DNA, 203 bp, synthetic construct; identical to SEQ ID NO: 4093
  source 1..203: mol_type = other DNA

SEQ ID NO: 29997 - DNA, 203 bp, synthetic construct; identical to SEQ ID NO: 4097
  source 1..203: mol_type = other DNA

SEQ ID NO: 29998 - DNA, 203 bp, synthetic construct; identical to SEQ ID NO: 4101
  source 1..203: mol_type = other DNA

SEQ ID NO: 29999 - DNA, 203 bp, synthetic construct; identical to SEQ ID NO: 4108
  source 1..203: mol_type = other DNA

SEQ ID NO: 30000 - DNA, 203 bp, synthetic construct; identical to SEQ ID NO: 4109
  source 1..203: mol_type = other DNA

SEQ ID NO: 30001 - DNA, 203 bp, synthetic construct; identical to SEQ ID NO: 4113
  source 1..203: mol_type = other DNA

SEQ ID NO: 30002 - DNA, 203 bp, synthetic construct; identical to SEQ ID NO: 4115
  source 1..203: mol_type = other DNA

SEQ ID NO: 30003 - DNA, 203 bp, synthetic construct; identical to SEQ ID NO: 4116
  source 1..203: mol_type = other DNA

SEQ ID NO: 30004 - DNA, 203 bp, synthetic construct; identical to SEQ ID NO: 4127
  source 1..203: mol_type = other DNA

SEQ ID NO: 30005 - DNA, 203 bp, synthetic construct; identical to SEQ ID NO: 4131
  source 1..203: mol_type = other DNA

SEQ ID NO: 30006 - DNA, 203 bp, synthetic construct; identical to SEQ ID NO: 4149
  source 1..203: mol_type = other DNA

SEQ ID NO: 30007 - DNA, 203 bp, synthetic construct; identical to SEQ ID NO: 4151
  source 1..203: mol_type = other DNA

SEQ ID NO: 30008 - DNA, 203 bp, synthetic construct; identical to SEQ ID NO: 4152
  source 1..203: mol_type = other DNA

SEQ ID NO: 30009 - DNA, 203 bp, synthetic construct; identical to SEQ ID NO: 4155
  source 1..203: mol_type = other DNA

SEQ ID NO: 30010 - DNA, 203 bp, synthetic construct; identical to SEQ ID NO: 4156
  source 1..203: mol_type = other DNA

SEQ ID NO: 30011 - DNA, 203 bp, synthetic construct; identical to SEQ ID NO: 4157
  source 1..203: mol_type = other DNA

SEQ ID NO: 30012 - DNA, 203 bp, synthetic construct; identical to SEQ ID NO: 4164
  source 1..203: mol_type = other DNA

SEQ ID NO: 30013 - DNA, 203 bp, synthetic construct; identical to SEQ ID NO: 4169
  source 1..203: mol_type = other DNA

SEQ ID NO: 30014 - DNA, 203 bp, synthetic construct; identical to SEQ ID NO: 4171
  source 1..203: mol_type = other DNA

SEQ ID NO: 30015 - DNA, 203 bp, synthetic construct; identical to SEQ ID NO: 4172
  source 1..203: mol_type = other DNA

SEQ ID NO: 30016 - DNA, 203 bp, synthetic construct; identical to SEQ ID NO: 4176
  source 1..203: mol_type = other DNA

SEQ ID NO: 30017 - DNA, 203 bp, synthetic construct; identical to SEQ ID NO: 4179
  source 1..203: mol_type = other DNA

SEQ ID NO: 30018 - DNA, 203 bp, synthetic construct; identical to SEQ ID NO: 4189
  source 1..203: mol_type = other DNA

SEQ ID NO: 30019 - DNA, 203 bp, synthetic construct; identical to SEQ ID NO: 4190
  source 1..203: mol_type = other DNA

SEQ ID NO: 30020 - DNA, 203 bp, synthetic construct; identical to SEQ ID NO: 4205
  source 1..203: mol_type = other DNA

SEQ ID NO: 30021 - DNA, 203 bp, synthetic construct; identical to SEQ ID NO: 4210
  source 1..203: mol_type = other DNA

SEQ ID NO: 30022 - DNA, 203 bp, synthetic construct; identical to SEQ ID NO: 4211
  source 1..203: mol_type = other DNA

SEQ ID NO: 30023 - DNA, 203 bp, synthetic construct; identical to SEQ ID NO: 4234
  source 1..203: mol_type = other DNA

SEQ ID NO: 30024 - DNA, 203 bp, synthetic construct; identical to SEQ ID NO: 4237
  source 1..203: mol_type = other DNA

SEQ ID NO: 30025 - DNA, 203 bp, synthetic construct; identical to SEQ ID NO: 4245
  source 1..203: mol_type = other DNA

SEQ ID NO: 30026 - DNA, 203 bp, synthetic construct; identical to SEQ ID NO: 4262
  source 1..203: mol_type = other DNA

SEQ ID NO: 30027 - DNA, 203 bp, synthetic construct; identical to SEQ ID NO: 4264
  source 1..203: mol_type = other DNA

SEQ ID NO: 30028 - DNA, 203 bp, synthetic construct; identical to SEQ ID NO: 4265
  source 1..203: mol_type = other DNA

SEQ ID NO: 30029 - DNA, 203 bp, synthetic construct; identical to SEQ ID NO: 4269
  source 1..203: mol_type = other DNA

SEQ ID NO: 30030 - DNA, 203 bp, synthetic construct; identical to SEQ ID NO: 4272
  source 1..203: mol_type = other DNA

SEQ ID NO: 30031 - DNA, 203 bp, synthetic construct; identical to SEQ ID NO: 4306
  source 1..203: mol_type = other DNA

SEQ ID NO: 30032 - DNA, 203 bp, synthetic construct; identical to SEQ ID NO: 4311
  source 1..203: mol_type = other DNA

SEQ ID NO: 30033 - DNA, 203 bp, synthetic construct; identical to SEQ ID NO: 4315
  source 1..203: mol_type = other DNA

SEQ ID NO: 30034 - DNA, 203 bp, synthetic construct; identical to SEQ ID NO: 4325
  source 1..203: mol_type = other DNA

SEQ ID NO: 30035 - DNA, 203 bp, synthetic construct; identical to SEQ ID NO: 4328
  source 1..203: mol_type = other DNA

SEQ ID NO: 30036 - DNA, 203 bp, synthetic construct; identical to SEQ ID NO: 4329
  source 1..203: mol_type = other DNA

SEQ ID NO: 30037 - DNA, 203 bp, synthetic construct; identical to SEQ ID NO: 4333
  source 1..203: mol_type = other DNA

SEQ ID NO: 30038 - DNA, 203 bp, synthetic construct; identical to SEQ ID NO: 4334
  source 1..203: mol_type = other DNA

SEQ ID NO: 30039 - DNA, 203 bp, synthetic construct; identical to SEQ ID NO: 4337
  source 1..203: mol_type = other DNA

SEQ ID NO: 30040 - DNA, 203 bp, synthetic construct; identical to SEQ ID NO: 4348
  source 1..203: mol_type = other DNA

SEQ ID NO: 30041 - DNA, 203 bp, synthetic construct; identical to SEQ ID NO: 4351
  source 1..203: mol_type = other DNA

SEQ ID NO: 30042 - DNA, 203 bp, synthetic construct; identical to SEQ ID NO: 4352
  source 1..203: mol_type = other DNA

SEQ ID NO: 30043 - DNA, 203 bp, synthetic construct; identical to SEQ ID NO: 4363
  source 1..203: mol_type = other DNA

SEQ ID NO: 30044 - DNA, 203 bp, synthetic construct; identical to SEQ ID NO: 4366
  source 1..203: mol_type = other DNA

SEQ ID NO: 30045 - DNA, 203 bp, synthetic construct; identical to SEQ ID NO: 4373
  source 1..203: mol_type = other DNA

SEQ ID NO: 30046 - DNA, 203 bp, synthetic construct; identical to SEQ ID NO: 4377
  source 1..203: mol_type = other DNA

SEQ ID NO: 30047 - DNA, 203 bp, synthetic construct; identical to SEQ ID NO: 4379
  source 1..203: mol_type = other DNA

SEQ ID NO: 30048 - DNA, 203 bp, synthetic construct; identical to SEQ ID NO: 4385
  source 1..203: mol_type = other DNA

SEQ ID NO: 30049 - DNA, 203 bp, synthetic construct; identical to SEQ ID NO: 4390
  source 1..203: mol_type = other DNA

SEQ ID NO: 30050 - DNA, 203 bp, synthetic construct; identical to SEQ ID NO: 4405
  source 1..203: mol_type = other DNA

SEQ ID NO: 30051 - DNA, 203 bp, synthetic construct; identical to SEQ ID NO: 4411
  source 1..203: mol_type = other DNA

SEQ ID NO: 30052 - DNA, 203 bp, synthetic construct; identical to SEQ ID NO: 4412
  source 1..203: mol_type = other DNA

SEQ ID NO: 30053 - DNA, 203 bp, synthetic construct; identical to SEQ ID NO: 4418
  source 1..203: mol_type = other DNA

SEQ ID NO: 30054 - DNA, 203 bp, synthetic construct; identical to SEQ ID NO: 4422
  source 1..203: mol_type = other DNA

SEQ ID NO: 30055 - DNA, 203 bp, synthetic construct; identical to SEQ ID NO: 4425
  source 1..203: mol_type = other DNA

SEQ ID NO: 30056 - DNA, 203 bp, synthetic construct; identical to SEQ ID NO: 4454
  source 1..203: mol_type = other DNA

SEQ ID NO: 30057 - DNA, 203 bp, synthetic construct; identical to SEQ ID NO: 4461
  source 1..203: mol_type = other DNA

SEQ ID NO: 30058 - DNA, 203 bp, synthetic construct; identical to SEQ ID NO: 4473
  source 1..203: mol_type = other DNA

SEQ ID NO: 30059 - DNA, 203 bp, synthetic construct; identical to SEQ ID NO: 4476
  source 1..203: mol_type = other DNA

SEQ ID NO: 30060 - DNA, 203 bp, synthetic construct; identical to SEQ ID NO: 4477
  source 1..203: mol_type = other DNA

SEQ ID NO: 30061 - DNA, 203 bp, synthetic construct; identical to SEQ ID NO: 4482
  source 1..203: mol_type = other DNA

SEQ ID NO: 30062 - DNA, 203 bp, synthetic construct; identical to SEQ ID NO: 4491
  source 1..203: mol_type = other DNA

SEQ ID NO: 30063 - DNA, 203 bp, synthetic construct; identical to SEQ ID NO: 4492
  source 1..203: mol_type = other DNA

SEQ ID NO: 30064 - DNA, 203 bp, synthetic construct; identical to SEQ ID NO: 4496
  source 1..203: mol_type = other DNA

SEQ ID NO: 30065 - DNA, 203 bp, synthetic construct; identical to SEQ ID NO: 4502
  source 1..203: mol_type = other DNA

SEQ ID NO: 30066 - DNA, 203 bp, synthetic construct; identical to SEQ ID NO: 4514
  source 1..203: mol_type = other DNA

SEQ ID NO: 30067 - DNA, 203 bp, synthetic construct; identical to SEQ ID NO: 4517
  source 1..203: mol_type = other DNA

SEQ ID NO: 30068 - DNA, 203 bp, synthetic construct; identical to SEQ ID NO: 4518
  source 1..203: mol_type = other DNA

SEQ ID NO: 30069 - DNA, 203 bp, synthetic construct; identical to SEQ ID NO: 4519
  source 1..203: mol_type = other DNA

SEQ ID NO: 30070 - DNA, 203 bp, synthetic construct; identical to SEQ ID NO: 4520
  source 1..203: mol_type = other DNA

SEQ ID NO: 30071 - DNA, 203 bp, synthetic construct; identical to SEQ ID NO: 4521
  source 1..203: mol_type = other DNA

SEQ ID NO: 30072 - DNA, 203 bp, synthetic construct; identical to SEQ ID NO: 4522
  source 1..203: mol_type = other DNA

SEQ ID NO: 30073 - DNA, 203 bp, synthetic construct; identical to SEQ ID NO: 4523
  source 1..203: mol_type = other DNA

SEQ ID NO: 30074 - DNA, 203 bp, synthetic construct; identical to SEQ ID NO: 4524
  source 1..203: mol_type = other DNA

SEQ ID NO: 30075 - DNA, 203 bp, synthetic construct; identical to SEQ ID NO: 4525
  source 1..203: mol_type = other DNA

SEQ ID NO: 30076 - DNA, 203 bp, synthetic construct; identical to SEQ ID NO: 4526
  source 1..203: mol_type = other DNA

SEQ ID NO: 30077 - DNA, 203 bp, synthetic construct; identical to SEQ ID NO: 4527
  source 1..203: mol_type = other DNA

SEQ ID NO: 30078 - DNA, 203 bp, synthetic construct; identical to SEQ ID NO: 4528
  source 1..203: mol_type = other DNA

SEQ ID NO: 30079 - DNA, 203 bp, synthetic construct; identical to SEQ ID NO: 4529
  source 1..203: mol_type = other DNA

SEQ ID NO: 30080 - DNA, 203 bp, synthetic construct; identical to SEQ ID NO: 4530
  source 1..203: mol_type = other DNA

SEQ ID NO: 30081 - DNA, 203 bp, synthetic construct; identical to SEQ ID NO: 4531
  source 1..203: mol_type = other DNA

SEQ ID NO: 30082 - DNA, 203 bp, synthetic construct; identical to SEQ ID NO: 4532
  source 1..203: mol_type = other DNA

SEQ ID NO: 30083 - DNA, 203 bp, synthetic construct; identical to SEQ ID NO: 4533
  source 1..203: mol_type = other DNA

SEQ ID NO: 30084 - DNA, 203 bp, synthetic construct; identical to SEQ ID NO: 4534
  source 1..203: mol_type = other DNA

SEQ ID NO: 30085 - DNA, 203 bp, synthetic construct; identical to SEQ ID NO: 4572
  source 1..203: mol_type = other DNA

SEQ ID NO: 30086 - DNA, 203 bp, synthetic construct; identical to SEQ ID NO: 4628
  source 1..203: mol_type = other DNA

SEQ ID NO: 30087 - DNA, 203 bp, synthetic construct; identical to SEQ ID NO: 4629
  source 1..203: mol_type = other DNA

SEQ ID NO: 30088 - DNA, 203 bp, synthetic construct; identical to SEQ ID NO: 4634
  source 1..203: mol_type = other DNA

SEQ ID NO: 30089 - DNA, 203 bp, synthetic construct; identical to SEQ ID NO: 4637
  source 1..203: mol_type = other DNA

SEQ ID NO: 30090 - DNA, 203 bp, synthetic construct; identical to SEQ ID NO: 4644
  source 1..203: mol_type = other DNA

SEQ ID NO: 30091 - DNA, 203 bp, synthetic construct; identical to SEQ ID NO: 4650
  source 1..203: mol_type = other DNA

SEQ ID NO: 30092 - DNA, 203 bp, synthetic construct; identical to SEQ ID NO: 4655
  source 1..203: mol_type = other DNA

SEQ ID NO: 30093 - DNA, 203 bp, synthetic construct; identical to SEQ ID NO: 4659
  source 1..203: mol_type = other DNA

SEQ ID NO: 30094 - DNA, 203 bp, synthetic construct; identical to SEQ ID NO: 4690
  source 1..203: mol_type = other DNA

SEQ ID NO: 30095 - DNA, 203 bp, synthetic construct; identical to SEQ ID NO: 4691
  source 1..203: mol_type = other DNA

SEQ ID NO: 30096 - DNA, 203 bp, synthetic construct; identical to SEQ ID NO: 4692
  source 1..203: mol_type = other DNA

SEQ ID NO: 30097 - DNA, 203 bp, synthetic construct; identical to SEQ ID NO: 4693
  source 1..203: mol_type = other DNA

SEQ ID NO: 30098 - DNA, 203 bp, synthetic construct; identical to SEQ ID NO: 4694
  source 1..203: mol_type = other DNA

SEQ ID NO: 30099 - DNA, 203 bp, synthetic construct; identical to SEQ ID NO: 4695
  source 1..203: mol_type = other DNA

SEQ ID NO: 30100 - DNA, 203 bp, synthetic construct; identical to SEQ ID NO: 4696
  source 1..203: mol_type = other DNA

SEQ ID NO: 30101 - DNA, 203 bp, synthetic construct; identical to SEQ ID NO: 4697
  source 1..203: mol_type = other DNA

SEQ ID NO: 30102 - DNA, 203 bp, synthetic construct; identical to SEQ ID NO: 4698
  source 1..203: mol_type = other DNA

SEQ ID NO: 30103 - DNA, 203 bp, synthetic construct; identical to SEQ ID NO: 4699
  source 1..203: mol_type = other DNA

SEQ ID NO: 30104 - DNA, 203 bp, synthetic construct; identical to SEQ ID NO: 4700
  source 1..203: mol_type = other DNA

SEQ ID NO: 30105 - DNA, 203 bp, synthetic construct; identical to SEQ ID NO: 4707
  source 1..203: mol_type = other DNA

SEQ ID NO: 30106 - DNA, 203 bp, synthetic construct; identical to SEQ ID NO: 4708
  source 1..203: mol_type = other DNA

SEQ ID NO: 30107 - DNA, 203 bp, synthetic construct; identical to SEQ ID NO: 4709
  source 1..203: mol_type = other DNA

SEQ ID NO: 30108 - DNA, 203 bp, synthetic construct; identical to SEQ ID NO: 4710
  source 1..203: mol_type = other DNA

SEQ ID NO: 30109 - DNA, 203 bp, synthetic construct; identical to SEQ ID NO: 4711
  source 1..203: mol_type = other DNA

SEQ ID NO: 30110 - DNA, 203 bp, synthetic construct; identical to SEQ ID NO: 4712
  source 1..203: mol_type = other DNA

SEQ ID NO: 30111 - DNA, 203 bp, synthetic construct; identical to SEQ ID NO: 4719
  source 1..203: mol_type = other DNA

SEQ ID NO: 30112 - DNA, 203 bp, synthetic construct; identical to SEQ ID NO: 4720
  source 1..203: mol_type = other DNA

SEQ ID NO: 30113 - DNA, 203 bp, synthetic construct; identical to SEQ ID NO: 4721
  source 1..203: mol_type = other DNA

SEQ ID NO: 30114 - DNA, 203 bp, synthetic construct; identical to SEQ ID NO: 4722
  source 1..203: mol_type = other DNA

SEQ ID NO: 30115 - DNA, 203 bp, synthetic construct; identical to SEQ ID NO: 4732
  source 1..203: mol_type = other DNA

SEQ ID NO: 30116 - DNA, 203 bp, synthetic construct; identical to SEQ ID NO: 4741
  source 1..203: mol_type = other DNA

SEQ ID NO: 30117 - DNA, 203 bp, synthetic construct; identical to SEQ ID NO: 4743
  source 1..203: mol_type = other DNA

SEQ ID NO: 30118 - DNA, 203 bp, synthetic construct; identical to SEQ ID NO: 4749
  source 1..203: mol_type = other DNA

SEQ ID NO: 30119 - DNA, 203 bp, synthetic construct; identical to SEQ ID NO: 4750
  source 1..203: mol_type = other DNA

SEQ ID NO: 30120 - DNA, 203 bp, synthetic construct; identical to SEQ ID NO: 4751
  source 1..203: mol_type = other DNA

SEQ ID NO: 30121 - DNA, 203 bp, synthetic construct; identical to SEQ ID NO: 4752
  source 1..203: mol_type = other DNA

SEQ ID NO: 30122 - DNA, 203 bp, synthetic construct; identical to SEQ ID NO: 4758
  source 1..203: mol_type = other DNA

SEQ ID NO: 30123 - DNA, 203 bp, synthetic construct; identical to SEQ ID NO: 4759
  source 1..203: mol_type = other DNA

SEQ ID NO: 30124 - DNA, 203 bp, synthetic construct; identical to SEQ ID NO: 4760
  source 1..203: mol_type = other DNA

SEQ ID NO: 30125 - DNA, 203 bp, synthetic construct; identical to SEQ ID NO: 4761
  source 1..203: mol_type = other DNA

SEQ ID NO: 30126 - DNA, 203 bp, synthetic construct; identical to SEQ ID NO: 4762
  source 1..203: mol_type = other DNA

SEQ ID NO: 30127 - DNA, 203 bp, synthetic construct; identical to SEQ ID NO: 4763
  source 1..203: mol_type = other DNA

SEQ ID NO: 30128 - DNA, 203 bp, synthetic construct; identical to SEQ ID NO: 4771
  source 1..203: mol_type = other DNA

SEQ ID NO: 30129 - DNA, 203 bp, synthetic construct; identical to SEQ ID NO: 4772
  source 1..203: mol_type = other DNA

SEQ ID NO: 30130 - DNA, 203 bp, synthetic construct; identical to SEQ ID NO: 4773
  source 1..203: mol_type = other DNA

SEQ ID NO: 30131 - DNA, 203 bp, synthetic construct; identical to SEQ ID NO: 4774
  source 1..203: mol_type = other DNA

SEQ ID NO: 30132 - DNA, 203 bp, synthetic construct; identical to SEQ ID NO: 4775
  source 1..203: mol_type = other DNA

SEQ ID NO: 30133 - DNA, 203 bp, synthetic construct; identical to SEQ ID NO: 4778
  source 1..203: mol_type = other DNA

SEQ ID NO: 30134 - DNA, 203 bp, synthetic construct; identical to SEQ ID NO: 4789
  source 1..203: mol_type = other DNA

SEQ ID NO: 30135 - DNA, 203 bp, synthetic construct; identical to SEQ ID NO: 4790
  source 1..203: mol_type = other DNA

SEQ ID NO: 30136 - DNA, 203 bp, synthetic construct; identical to SEQ ID NO: 4803
  source 1..203: mol_type = other DNA

SEQ ID NO: 30137 - DNA, 203 bp, synthetic construct; identical to SEQ ID NO: 4804
  source 1..203: mol_type = other DNA

SEQ ID NO: 30138 - DNA, 203 bp, synthetic construct; identical to SEQ ID NO: 4813
  source 1..203: mol_type = other DNA

SEQ ID NO: 30139 - DNA, 203 bp, synthetic construct; identical to SEQ ID NO: 4814
  source 1..203: mol_type = other DNA

SEQ ID NO: 30140 - DNA, 203 bp, synthetic construct; identical to SEQ ID NO: 4815
  source 1..203: mol_type = other DNA

SEQ ID NO: 30141 - DNA, 203 bp, synthetic construct; identical to SEQ ID NO: 4816
  source 1..203: mol_type = other DNA

SEQ ID NO: 30142 - DNA, 203 bp, synthetic construct; identical to SEQ ID NO: 4817
  source 1..203: mol_type = other DNA

SEQ ID NO: 30143 - DNA, 203 bp, synthetic construct; identical to SEQ ID NO: 4819
  source 1..203: mol_type = other DNA

SEQ ID NO: 30144 - DNA, 203 bp, synthetic construct; identical to SEQ ID NO: 4828
  source 1..203: mol_type = other DNA

SEQ ID NO: 30145 - DNA, 203 bp, synthetic construct; identical to SEQ ID NO: 4829
  source 1..203: mol_type = other DNA

SEQ ID NO: 30146 - DNA, 203 bp, synthetic construct; identical to SEQ ID NO: 4830
  source 1..203: mol_type = other DNA

SEQ ID NO: 30147 - DNA, 203 bp, synthetic construct; identical to SEQ ID NO: 4831
  source 1..203: mol_type = other DNA

SEQ ID NO: 30148 - DNA, 203 bp, synthetic construct; identical to SEQ ID NO: 4832
  source 1..203: mol_type = other DNA

SEQ ID NO: 30149 - DNA, 203 bp, synthetic construct; identical to SEQ ID NO: 4833
  source 1..203: mol_type = other DNA

SEQ ID NO: 30150 - DNA, 203 bp, synthetic construct; identical to SEQ ID NO: 4834
  source 1..203: mol_type = other DNA

SEQ ID NO: 30151 - DNA, 203 bp, synthetic construct; identical to SEQ ID NO: 4835
  source 1..203: mol_type = other DNA

SEQ ID NO: 30152 - DNA, 203 bp, synthetic construct; identical to SEQ ID NO: 4836
  source 1..203: mol_type = other DNA

SEQ ID NO: 30153 - DNA, 203 bp, synthetic construct; identical to SEQ ID NO: 4837
  source 1..203: mol_type = other DNA

SEQ ID NO: 30154 - DNA, 203 bp, synthetic construct; identical to SEQ ID NO: 4838
  source 1..203: mol_type = other DNA

SEQ ID NO: 30155 - DNA, 203 bp, synthetic construct; identical to SEQ ID NO: 4839
  source 1..203: mol_type = other DNA

SEQ ID NO: 30156 - DNA, 203 bp, synthetic construct; identical to SEQ ID NO: 4840
  source 1..203: mol_type = other DNA

SEQ ID NO: 30157 - DNA, 203 bp, synthetic construct; identical to SEQ ID NO: 4841
  source 1..203: mol_type = other DNA

SEQ ID NO: 30158 - DNA, 203 bp, synthetic construct; identical to SEQ ID NO: 4842
  source 1..203: mol_type = other DNA

SEQ ID NO: 30159 - DNA, 203 bp, synthetic construct; identical to SEQ ID NO: 4843
  source 1..203: mol_type = other DNA

SEQ ID NO: 30160 - DNA, 203 bp, synthetic construct; identical to SEQ ID NO: 4844
  source 1..203: mol_type = other DNA

SEQ ID NO: 30161 - DNA, 203 bp, synthetic construct; identical to SEQ ID NO: 4845
  source 1..203: mol_type = other DNA

SEQ ID NO: 30162 - DNA, 203 bp, synthetic construct; identical to SEQ ID NO: 4846
  source 1..203: mol_type = other DNA

SEQ ID NO: 30163 - DNA, 203 bp, synthetic construct; identical to SEQ ID NO: 4847
  source 1..203: mol_type = other DNA

SEQ ID NO: 30164 - DNA, 203 bp, synthetic construct; identical to SEQ ID NO: 4848
  source 1..203: mol_type = other DNA

SEQ ID NO: 30165 - DNA, 203 bp, synthetic construct; identical to SEQ ID NO: 4849
  source 1..203: mol_type = other DNA

SEQ ID NO: 30166 - DNA, 203 bp, synthetic construct; identical to SEQ ID NO: 4850
  source 1..203: mol_type = other DNA

SEQ ID NO: 30167 - DNA, 203 bp, synthetic construct; identical to SEQ ID NO: 4851
  source 1..203: mol_type = other DNA

SEQ ID NO: 30168 - DNA, 203 bp, synthetic construct; identical to SEQ ID NO: 4852
  source 1..203: mol_type = other DNA

SEQ ID NO: 30169 - DNA, 203 bp, synthetic construct; identical to SEQ ID NO: 4862
  source 1..203: mol_type = other DNA

SEQ ID NO: 30170 - DNA, 203 bp, synthetic construct; identical to SEQ ID NO: 4893
  source 1..203: mol_type = other DNA

SEQ ID NO: 30171 - DNA, 203 bp, synthetic construct; identical to SEQ ID NO: 4903
  source 1..203: mol_type = other DNA

SEQ ID NO: 30172 - DNA, 203 bp, synthetic construct; identical to SEQ ID NO: 4904
  source 1..203: mol_type = other DNA

SEQ ID NO: 30173 - DNA, 203 bp, synthetic construct; identical to SEQ ID NO: 4905
  source 1..203: mol_type = other DNA

SEQ ID NO: 30174 - DNA, 203 bp, synthetic construct; identical to SEQ ID NO: 4906
  source 1..203: mol_type = other DNA

SEQ ID NO: 30175 - DNA, 203 bp, synthetic construct; identical to SEQ ID NO: 4907
  source 1..203: mol_type = other DNA

SEQ ID NO: 30176 - DNA, 203 bp, synthetic construct; identical to SEQ ID NO: 4917
  source 1..203: mol_type = other DNA

SEQ ID NO: 30177 - DNA, 203 bp, synthetic construct; identical to SEQ ID NO: 4932
  source 1..203: mol_type = other DNA

SEQ ID NO: 30178 - DNA, 203 bp, synthetic construct; identical to SEQ ID NO: 4933
  source 1..203: mol_type = other DNA

SEQ ID NO: 30179 - DNA, 203 bp, synthetic construct; identical to SEQ ID NO: 4934
  source 1..203: mol_type = other DNA

SEQ ID NO: 30180 - DNA, 203 bp, synthetic construct; identical to SEQ ID NO: 4935
  source 1..203: mol_type = other DNA

SEQ ID NO: 30181 - DNA, 203 bp, synthetic construct; identical to SEQ ID NO: 4937
  source 1..203: mol_type = other DNA

SEQ ID NO: 30182 - DNA, 203 bp, synthetic construct; identical to SEQ ID NO: 4948
  source 1..203: mol_type = other DNA

SEQ ID NO: 30183 - DNA, 203 bp, synthetic construct; identical to SEQ ID NO: 4949
  source 1..203: mol_type = other DNA

SEQ ID NO: 30184 - DNA, 203 bp, synthetic construct; identical to SEQ ID NO: 4950
  source 1..203: mol_type = other DNA

SEQ ID NO: 30185 - DNA, 203 bp, synthetic construct; identical to SEQ ID NO: 4951
  source 1..203: mol_type = other DNA

SEQ ID NO: 30186 - DNA, 203 bp, synthetic construct; identical to SEQ ID NO: 4952
  source 1..203: mol_type = other DNA

SEQ ID NO: 30187 - DNA, 203 bp, synthetic construct; identical to SEQ ID NO: 4953
  source 1..203: mol_type = other DNA

SEQ ID NO: 30188 - DNA, 203 bp, synthetic construct; identical to SEQ ID NO: 4954
  source 1..203: mol_type = other DNA

SEQ ID NO: 30189 - DNA, 203 bp, synthetic construct; identical to SEQ ID NO: 4955
  source 1..203: mol_type = other DNA

SEQ ID NO: 30190 - DNA, 203 bp, synthetic construct; identical to SEQ ID NO: 4956
  source 1..203: mol_type = other DNA

SEQ ID NO: 30191 - DNA, 203 bp, synthetic construct; identical to SEQ ID NO: 4957
  source 1..203: mol_type = other DNA

SEQ ID NO: 30192 - DNA, 203 bp, synthetic construct; identical to SEQ ID NO: 4958
  source 1..203: mol_type = other DNA

SEQ ID NO: 30193 - DNA, 203 bp, synthetic construct; identical to SEQ ID NO: 4959
  source 1..203: mol_type = other DNA

SEQ ID NO: 30194 - DNA, 203 bp, synthetic construct; identical to SEQ ID NO: 4960
  source 1..203: mol_type = other DNA

SEQ ID NO: 30195 - DNA, 203 bp, synthetic construct; identical to SEQ ID NO: 4961
  source 1..203: mol_type = other DNA

SEQ ID NO: 30196 - DNA, 203 bp, synthetic construct; identical to SEQ ID NO: 4963
  source 1..203: mol_type = other DNA

SEQ ID NO: 30197 - DNA, 203 bp, synthetic construct; identical to SEQ ID NO: 4964
  source 1..203: mol_type = other DNA

SEQ ID NO: 30198 - DNA, 203 bp, synthetic construct; identical to SEQ ID NO: 4965
  source 1..203: mol_type = other DNA

SEQ ID NO: 30199 - DNA, 203 bp, synthetic construct; identical to SEQ ID NO: 4966
  source 1..203: mol_type = other DNA

SEQ ID NO: 30200 - DNA, 203 bp, synthetic construct; identical to SEQ ID NO: 4967
  source 1..203: mol_type = other DNA

SEQ ID NO: 30201 - DNA, 203 bp, synthetic construct; identical to SEQ ID NO: 4968
  source 1..203: mol_type = other DNA

SEQ ID NO: 30202 - DNA, 203 bp, synthetic construct; identical to SEQ ID NO: 4969
  source 1..203: mol_type = other DNA

SEQ ID NO: 30203 - DNA, 203 bp, synthetic construct; identical to SEQ ID NO: 4970
  source 1..203: mol_type = other DNA

SEQ ID NO: 30204 - DNA, 203 bp, synthetic construct; identical to SEQ ID NO: 4971
  source 1..203: mol_type = other DNA

SEQ ID NO: 30205 - DNA, 203 bp, synthetic construct; identical to SEQ ID NO: 4972
  source 1..203: mol_type = other DNA

SEQ ID NO: 30206 - DNA, 203 bp, synthetic construct; identical to SEQ ID NO: 4973
  source 1..203: mol_type = other DNA

SEQ ID NO: 30207 - DNA, 203 bp, synthetic construct; identical to SEQ ID NO: 4974
  source 1..203: mol_type = other DNA

SEQ ID NO: 30208 - DNA, 203 bp, synthetic construct; identical to SEQ ID NO: 4975
  source 1..203: mol_type = other DNA

SEQ ID NO: 30209 - DNA, 203 bp, synthetic construct; identical to SEQ ID NO: 4976
  source 1..203: mol_type = other DNA

SEQ ID NO: 30210 - DNA, 203 bp, synthetic construct; identical to SEQ ID NO: 4977
  source 1..203: mol_type = other DNA

SEQ ID NO: 30211 - DNA, 203 bp, synthetic construct; identical to SEQ ID NO: 4978
  source 1..203: mol_type = other DNA

SEQ ID NO: 30212 - DNA, 203 bp, synthetic construct; identical to SEQ ID NO: 4979
  source 1..203: mol_type = other DNA

SEQ ID NO: 30213 - DNA, 203 bp, synthetic construct; identical to SEQ ID NO: 4980
  source 1..203: mol_type = other DNA

SEQ ID NO: 30214 - DNA, 203 bp, synthetic construct; identical to SEQ ID NO: 4981
  source 1..203: mol_type = other DNA

SEQ ID NO: 30215 - DNA, 203 bp, synthetic construct; identical to SEQ ID NO: 5012
  source 1..203: mol_type = other DNA

SEQ ID NO: 30216 - DNA, 203 bp, synthetic construct; identical to SEQ ID NO: 5037
  source 1..203: mol_type = other DNA

SEQ ID NO: 30217 - DNA, 203 bp, synthetic construct; identical to SEQ ID NO: 5048
  source 1..203: mol_type = other DNA

SEQ ID NO: 30218 - DNA, 203 bp, synthetic construct; identical to SEQ ID NO: 5052
  source 1..203: mol_type = other DNA

SEQ ID NO: 30219 - DNA, 203 bp, synthetic construct; identical to SEQ ID NO: 5053
  source 1..203: mol_type = other DNA

SEQ ID NO: 30220 - DNA, 203 bp, synthetic construct; identical to SEQ ID NO: 5054
  source 1..203: mol_type = other DNA

SEQ ID NO: 30221 - DNA, 203 bp, synthetic construct; identical to SEQ ID NO: 5055
  source 1..203: mol_type = other DNA

SEQ ID NO: 30222 - DNA, 203 bp, synthetic construct; identical to SEQ ID NO: 5056
  source 1..203: mol_type = other DNA

SEQ ID NO: 30223 - DNA, 203 bp, synthetic construct; identical to SEQ ID NO: 5057
  source 1..203: mol_type = other DNA

SEQ ID NO: 30224 - DNA, 203 bp, synthetic construct; identical to SEQ ID NO: 5058
  source 1..203: mol_type = other DNA

SEQ ID NO: 30225 - DNA, 203 bp, synthetic construct; identical to SEQ ID NO: 5059
  source 1..203: mol_type = other DNA

SEQ ID NO: 30226 - DNA, 203 bp, synthetic construct; identical to SEQ ID NO: 5060
  source 1..203: mol_type = other DNA

SEQ ID NO: 30227 - DNA, 203 bp, synthetic construct; identical to SEQ ID NO: 5066
  source 1..203: mol_type = other DNA

SEQ ID NO: 30228 - DNA, 203 bp, synthetic construct; identical to SEQ ID NO: 5067
  source 1..203: mol_type = other DNA

SEQ ID NO: 30229 - DNA, 203 bp, synthetic construct; identical to SEQ ID NO: 5068
  source 1..203: mol_type = other DNA

SEQ ID NO: 30230 - DNA, 203 bp, synthetic construct; identical to SEQ ID NO: 5069
  source 1..203: mol_type = other DNA

SEQ ID NO: 30231 - DNA, 203 bp, synthetic construct; identical to SEQ ID NO: 5084
  source 1..203: mol_type = other DNA

SEQ ID NO: 30232 - DNA, 203 bp, synthetic construct; identical to SEQ ID NO: 5092
  source 1..203: mol_type = other DNA

SEQ ID NO: 30233 - DNA, 203 bp, synthetic construct; identical to SEQ ID NO: 5093
  source 1..203: mol_type = other DNA

SEQ ID NO: 30234 - DNA, 203 bp, synthetic construct; identical to SEQ ID NO: 5094
  source 1..203: mol_type = other DNA

SEQ ID NO: 30235 - DNA, 203 bp, synthetic construct; identical to SEQ ID NO: 5095
  source 1..203: mol_type = other DNA

SEQ ID NO: 30236 - DNA, 203 bp, synthetic construct; identical to SEQ ID NO: 5101
  source 1..203: mol_type = other DNA

SEQ ID NO: 30237 - DNA, 203 bp, synthetic construct; identical to SEQ ID NO: 5102
  source 1..203: mol_type = other DNA

SEQ ID NO: 30238 - DNA, 203 bp, synthetic construct; identical to SEQ ID NO: 5103
  source 1..203: mol_type = other DNA

SEQ ID NO: 30239 - DNA, 203 bp, synthetic construct; identical to SEQ ID NO: 5106
  source 1..203: mol_type = other DNA

SEQ ID NO: 30240 - DNA, 203 bp, synthetic construct; identical to SEQ ID NO: 5107
  source 1..203: mol_type = other DNA

SEQ ID NO: 30241 - DNA, 203 bp, synthetic construct; identical to SEQ ID NO: 5108
  source 1..203: mol_type = other DNA

SEQ ID NO: 30242 - DNA, 203 bp, synthetic construct; identical to SEQ ID NO: 5109
  source 1..203: mol_type = other DNA

SEQ ID NO: 30243 - DNA, 203 bp, synthetic construct; identical to SEQ ID NO: 5110
  source 1..203: mol_type = other DNA

SEQ ID NO: 30244 - DNA, 203 bp, synthetic construct; identical to SEQ ID NO: 5111
  source 1..203: mol_type = other DNA

SEQ ID NO: 30245 - DNA, 203 bp, synthetic construct; identical to SEQ ID NO: 5133
  source 1..203: mol_type = other DNA

SEQ ID NO: 30246 - DNA, 203 bp, synthetic construct; identical to SEQ ID NO: 5135
  source 1..203: mol_type = other DNA

SEQ ID NO: 30247 - DNA, 203 bp, synthetic construct; identical to SEQ ID NO: 5139
  source 1..203: mol_type = other DNA

SEQ ID NO: 30248 - DNA, 203 bp, synthetic construct; identical to SEQ ID NO: 5143
  source 1..203: mol_type = other DNA

SEQ ID NO: 30249 - DNA, 203 bp, synthetic construct; identical to SEQ ID NO: 5156
  source 1..203: mol_type = other DNA

SEQ ID NO: 30250 - DNA, 203 bp, synthetic construct; identical to SEQ ID NO: 5157
  source 1..203: mol_type = other DNA

SEQ ID NO: 30251 - DNA, 203 bp, synthetic construct; identical to SEQ ID NO: 5158
  source 1..203: mol_type = other DNA

SEQ ID NO: 30252 - DNA, 203 bp, synthetic construct; identical to SEQ ID NO: 5159
  source 1..203: mol_type = other DNA

SEQ ID NO: 30253 - DNA, 203 bp, synthetic construct; identical to SEQ ID NO: 5160
  source 1..203: mol_type = other DNA

SEQ ID NO: 30254 - DNA, 203 bp, synthetic construct; identical to SEQ ID NO: 5199
  source 1..203: mol_type = other DNA

SEQ ID NO: 30255 - DNA, 203 bp, synthetic construct; identical to SEQ ID NO: 5200
  source 1..203: mol_type = other DNA

SEQ ID NO: 30256 - DNA, 203 bp, synthetic construct; identical to SEQ ID NO: 5211
  source 1..203: mol_type = other DNA

SEQ ID NO: 30257 - DNA, 203 bp, synthetic construct; identical to SEQ ID NO: 5234
  source 1..203: mol_type = other DNA

SEQ ID NO: 30258 - DNA, 203 bp, synthetic construct; identical to SEQ ID NO: 5254
  source 1..203: mol_type = other DNA

SEQ ID NO: 30259 - DNA, 203 bp, synthetic construct; identical to SEQ ID NO: 5260
  source 1..203: mol_type = other DNA

SEQ ID NO: 30260 - DNA, 203 bp, synthetic construct; identical to SEQ ID NO: 5262
  source 1..203: mol_type = other DNA

SEQ ID NO: 30261 - DNA, 203 bp, synthetic construct; identical to SEQ ID NO: 5263
  source 1..203: mol_type = other DNA

SEQ ID NO: 30262 - DNA, 203 bp, synthetic construct; identical to SEQ ID NO: 5266
  source 1..203: mol_type = other DNA

SEQ ID NO: 30263 - DNA, 203 bp, synthetic construct; identical to SEQ ID NO: 5271
  source 1..203: mol_type = other DNA

SEQ ID NO: 30264 - DNA, 203 bp, synthetic construct; identical to SEQ ID NO: 5272
  source 1..203: mol_type = other DNA

SEQ ID NO: 30265 - DNA, 203 bp, synthetic construct; identical to SEQ ID NO: 5273
  source 1..203: mol_type = other DNA

SEQ ID NO: 30266 - DNA, 203 bp, synthetic construct; identical to SEQ ID NO: 5283
  source 1..203: mol_type = other DNA

SEQ ID NO: 30267 - DNA, 203 bp, synthetic construct; identical to SEQ ID NO: 5284
  source 1..203: mol_type = other DNA

SEQ ID NO: 30268 - DNA, 203 bp, synthetic construct; identical to SEQ ID NO: 5285
  source 1..203: mol_type = other DNA

SEQ ID NO: 30269 - DNA, 203 bp, synthetic construct; identical to SEQ ID NO: 5286
  source 1..203: mol_type = other DNA

SEQ ID NO: 30270 - DNA, 203 bp, synthetic construct; identical to SEQ ID NO: 5287
  source 1..203: mol_type = other DNA

SEQ ID NO: 30271 - DNA, 203 bp, synthetic construct; identical to SEQ ID NO: 5288
  source 1..203: mol_type = other DNA

SEQ ID NO: 30272 - DNA, 203 bp, synthetic construct; identical to SEQ ID NO: 5293
  source 1..203: mol_type = other DNA

SEQ ID NO: 30273 - DNA, 203 bp, synthetic construct; identical to SEQ ID NO: 5294
  source 1..203: mol_type = other DNA

SEQ ID NO: 30274 - DNA, 203 bp, synthetic construct; identical to SEQ ID NO: 5306
  source 1..203: mol_type = other DNA

SEQ ID NO: 30275 - DNA, 203 bp, synthetic construct; identical to SEQ ID NO: 5307
  source 1..203: mol_type = other DNA

SEQ ID NO: 30276 - DNA, 203 bp, synthetic construct; identical to SEQ ID NO: 5308
  source 1..203: mol_type = other DNA

SEQ ID NO: 30277 - DNA, 203 bp, synthetic construct; identical to SEQ ID NO: 5309
  source 1..203: mol_type = other DNA

SEQ ID NO: 30278 - DNA, 203 bp, synthetic construct; identical to SEQ ID NO: 5310
  source 1..203: mol_type = other DNA

SEQ ID NO: 30279 - DNA, 203 bp, synthetic construct; identical to SEQ ID NO: 5311
  source 1..203: mol_type = other DNA

SEQ ID NO: 30280 - DNA, 203 bp, synthetic construct; identical to SEQ ID NO: 5312
  source 1..203: mol_type = other DNA

SEQ ID NO: 30281 - DNA, 203 bp, synthetic construct; identical to SEQ ID NO: 5313
  source 1..203: mol_type = other DNA

SEQ ID NO: 30282 - DNA, 203 bp, synthetic construct; identical to SEQ ID NO: 5314
  source 1..203: mol_type = other DNA

SEQ ID NO: 30283 - DNA, 203 bp, synthetic construct; identical to SEQ ID NO: 5315
  source 1..203: mol_type = other DNA

SEQ ID NO: 30284 - DNA, 203 bp, synthetic construct; identical to SEQ ID NO: 5316
  source 1..203: mol_type = other DNA

SEQ ID NO: 30285 - DNA, 203 bp, synthetic construct; identical to SEQ ID NO: 5317
  source 1..203: mol_type = other DNA

SEQ ID NO: 30286 - DNA, 203 bp, synthetic construct; identical to SEQ ID NO: 5318
  source 1..203: mol_type = other DNA

SEQ ID NO: 30287 - DNA, 203 bp, synthetic construct; identical to SEQ ID NO: 5319
  source 1..203: mol_type = other DNA

SEQ ID NO: 30288 - DNA, 203 bp, synthetic construct; identical to SEQ ID NO: 5320
  source 1..203: mol_type = other DNA

SEQ ID NO: 30289 - DNA, 203 bp, synthetic construct; identical to SEQ ID NO: 5321
  source 1..203: mol_type = other DNA

SEQ ID NO: 30290 - DNA, 203 bp, synthetic construct; identical to SEQ ID NO: 5322
  source 1..203: mol_type = other DNA

SEQ ID NO: 30291 - DNA, 203 bp, synthetic construct; identical to SEQ ID NO: 5323
  source 1..203: mol_type = other DNA

SEQ ID NO: 30292 - DNA, 203 bp, synthetic construct; identical to SEQ ID NO: 5324
  source 1..203: mol_type = other DNA

SEQ ID NO: 30293 - DNA, 203 bp, synthetic construct; identical to SEQ ID NO: 5325
  source 1..203: mol_type = other DNA

SEQ ID NO: 30294 - DNA, 203 bp, synthetic construct; identical to SEQ ID NO: 5326
  source 1..203: mol_type = other DNA

SEQ ID NO: 30295 - DNA, 203 bp, synthetic construct; identical to SEQ ID NO: 5327
  source 1..203: mol_type = other DNA

SEQ ID NO: 30296 - DNA, 203 bp, synthetic construct; identical to SEQ ID NO: 5328
  source 1..203: mol_type = other DNA

SEQ ID NO: 30297 - DNA, 203 bp, synthetic construct; identical to SEQ ID NO: 5329
  source 1..203: mol_type = other DNA

SEQ ID NO: 30298 - DNA, 203 bp, synthetic construct; identical to SEQ ID NO: 5330
  source 1..203: mol_type = other DNA

SEQ ID NO: 30299 - DNA, 203 bp, synthetic construct; identical to SEQ ID NO: 5331
  source 1..203: mol_type = other DNA

SEQ ID NO: 30300 - DNA, 203 bp, synthetic construct; identical to SEQ ID NO: 5334
  source 1..203: mol_type = other DNA

SEQ ID NO: 30301 - DNA, 203 bp, synthetic construct; identical to SEQ ID NO: 5365
  source 1..203: mol_type = other DNA

SEQ ID NO: 30302 - DNA, 203 bp, synthetic construct; identical to SEQ ID NO: 5366
  source 1..203: mol_type = other DNA

SEQ ID NO: 30303 - DNA, 203 bp, synthetic construct; identical to SEQ ID NO: 5367
  source 1..203: mol_type = other DNA

SEQ ID NO: 30304 - DNA, 203 bp, synthetic construct; identical to SEQ ID NO: 5368
  source 1..203: mol_type = other DNA

SEQ ID NO: 30305 - DNA, 203 bp, synthetic construct; identical to SEQ ID NO: 5371
  source 1..203: mol_type = other DNA

SEQ ID NO: 30306 - DNA, 203 bp, synthetic construct; identical to SEQ ID NO: 5381
  source 1..203: mol_type = other DNA

SEQ ID NO: 30307 - DNA, 203 bp, synthetic construct; identical to SEQ ID NO: 5382
  source 1..203: mol_type = other DNA

SEQ ID NO: 30308 - DNA, 203 bp, synthetic construct; identical to SEQ ID NO: 5383
  source 1..203: mol_type = other DNA

SEQ ID NO: 30309 - DNA, 203 bp, synthetic construct; identical to SEQ ID NO: 5384
  source 1..203: mol_type = other DNA

SEQ ID NO: 30310 - DNA, 203 bp, synthetic construct; identical to SEQ ID NO: 5385
  source 1..203: mol_type = other DNA

SEQ ID NO: 30311 - DNA, 203 bp, synthetic construct; identical to SEQ ID NO: 5386
  source 1..203: mol_type = other DNA

SEQ ID NO: 30312 - DNA, 203 bp, synthetic construct; identical to SEQ ID NO: 5387
  source 1..203: mol_type = other DNA

SEQ ID NO: 30313 - DNA, 203 bp, synthetic construct; identical to SEQ ID NO: 5388
  source 1..203: mol_type = other DNA

SEQ ID NO: 30314 - DNA, 203 bp, synthetic construct; identical to SEQ ID NO: 5389
  source 1..203: mol_type = other DNA

SEQ ID NO: 30315 - DNA, 203 bp, synthetic construct; identical to SEQ ID NO: 5390
  source 1..203: mol_type = other DNA

SEQ ID NO: 30316 - DNA, 203 bp, synthetic construct; identical to SEQ ID NO: 5391
  source 1..203: mol_type = other DNA

SEQ ID NO: 30317 - DNA, 203 bp, synthetic construct; identical to SEQ ID NO: 5395
  source 1..203: mol_type = other DNA

SEQ ID NO: 30318 - DNA, 203 bp, synthetic construct; identical to SEQ ID NO: 5396
  source 1..203: mol_type = other DNA

SEQ ID NO: 30319 - DNA, 203 bp, synthetic construct; identical to SEQ ID NO: 5397
  source 1..203: mol_type = other DNA

SEQ ID NO: 30320 - DNA, 203 bp, synthetic construct; identical to SEQ ID NO: 5398
  source 1..203: mol_type = other DNA

SEQ ID NO: 30321 - DNA, 203 bp, synthetic construct; identical to SEQ ID NO: 5399
  source 1..203: mol_type = other DNA

SEQ ID NO: 30322 - DNA, 203 bp, synthetic construct; identical to SEQ ID NO: 5400
  source 1..203: mol_type = other DNA

SEQ ID NO: 30323 - DNA, 203 bp, synthetic construct; identical to SEQ ID NO: 5401
  source 1..203: mol_type = other DNA

SEQ ID NO: 30324 - DNA, 203 bp, synthetic construct; identical to SEQ ID NO: 5402
  source 1..203: mol_type = other DNA

SEQ ID NO: 30325 - DNA, 203 bp, synthetic construct; identical to SEQ ID NO: 5403
  source 1..203: mol_type = other DNA

SEQ ID NO: 30326 - DNA, 203 bp, synthetic construct; identical to SEQ ID NO: 5404
  source 1..203: mol_type = other DNA

SEQ ID NO: 30327 - DNA, 203 bp, synthetic construct; identical to SEQ ID NO: 5405
  source 1..203: mol_type = other DNA

SEQ ID NO: 30328 - DNA, 203 bp, synthetic construct; identical to SEQ ID NO: 5412
  source 1..203: mol_type = other DNA

SEQ ID NO: 30329 - DNA, 203 bp, synthetic construct; identical to SEQ ID NO: 5413
  source 1..203: mol_type = other DNA

SEQ ID NO: 30330 - DNA, 203 bp, synthetic construct; identical to SEQ ID NO: 5414
  source 1..203: mol_type = other DNA

SEQ ID NO: 30331 - DNA, 203 bp, synthetic construct; identical to SEQ ID NO: 5415
  source 1..203: mol_type = other DNA

SEQ ID NO: 30332 - DNA, 203 bp, synthetic construct; identical to SEQ ID NO: 5416
  source 1..203: mol_type = other DNA

SEQ ID NO: 30333 - DNA, 203 bp, synthetic construct; identical to SEQ ID NO: 5417
  source 1..203: mol_type = other DNA

SEQ ID NO: 30334 - DNA, 203 bp, synthetic construct; identical to SEQ ID NO: 5418
  source 1..203: mol_type = other DNA

SEQ ID NO: 30335 - DNA, 203 bp, synthetic construct; identical to SEQ ID NO: 5419
  source 1..203: mol_type = other DNA

SEQ ID NO: 30336 - DNA, 203 bp, synthetic construct; identical to SEQ ID NO: 5420
  source 1..203: mol_type = other DNA

SEQ ID NO: 30337 - DNA, 203 bp, synthetic construct; identical to SEQ ID NO: 5421
  source 1..203: mol_type = other DNA

SEQ ID NO: 30338 - DNA, 203 bp, synthetic construct; identical to SEQ ID NO: 5422
  source 1..203: mol_type = other DNA

SEQ ID NO: 30339 - DNA, 203 bp, synthetic construct; identical to SEQ ID NO: 5423
  source 1..203: mol_type = other DNA

SEQ ID NO: 30340 - DNA, 203 bp, synthetic construct; identical to SEQ ID NO: 5424
  source 1..203: mol_type = other DNA

SEQ ID NO: 30341 - DNA, 203 bp, synthetic construct; identical to SEQ ID NO: 5425
  source 1..203: mol_type = other DNA

SEQ ID NO: 30342 - DNA, 203 bp, synthetic construct; identical to SEQ ID NO: 5426
  source 1..203: mol_type = other DNA

SEQ ID NO: 30343 - DNA, 203 bp, synthetic construct; identical to SEQ ID NO: 5427
  source 1..203: mol_type = other DNA

SEQ ID NO: 30344 - DNA, 203 bp, synthetic construct; identical to SEQ ID NO: 5428
  source 1..203: mol_type = other DNA

SEQ ID NO: 30345 - DNA, 203 bp, synthetic construct; identical to SEQ ID NO: 5429
  source 1..203: mol_type = other DNA

SEQ ID NO: 30346 - DNA, 203 bp, synthetic construct; identical to SEQ ID NO: 5430
  source 1..203: mol_type = other DNA

SEQ ID NO: 30347 - DNA, 203 bp, synthetic construct; identical to SEQ ID NO: 5431
  source 1..203: mol_type = other DNA

SEQ ID NO: 30348 - DNA, 203 bp, synthetic construct; identical to SEQ ID NO: 5432
  source 1..203: mol_type = other DNA

SEQ ID NO: 30349 - DNA, 203 bp, synthetic construct; identical to SEQ ID NO: 5433
  source 1..203: mol_type = other DNA

SEQ ID NO: 30350 - DNA, 203 bp, synthetic construct; identical to SEQ ID NO: 5434
  source 1..203: mol_type = other DNA

SEQ ID NO: 30351 - DNA, 203 bp, synthetic construct; identical to SEQ ID NO: 5449
  source 1..203: mol_type = other DNA

SEQ ID NO: 30352 - DNA, 203 bp, synthetic construct; identical to SEQ ID NO: 5458
  source 1..203: mol_type = other DNA

SEQ ID NO: 30353 - DNA, 203 bp, synthetic construct; identical to SEQ ID NO: 5466
  source 1..203: mol_type = other DNA

SEQ ID NO: 30354 - DNA, 203 bp, synthetic construct; identical to SEQ ID NO: 5467
  source 1..203: mol_type = other DNA

SEQ ID NO: 30355 - DNA, 203 bp, synthetic construct; identical to SEQ ID NO: 5468
  source 1..203: mol_type = other DNA

SEQ ID NO: 30356 - DNA, 203 bp, synthetic construct; identical to SEQ ID NO: 5469
  source 1..203: mol_type = other DNA

SEQ ID NO: 30357 - DNA, 203 bp, synthetic construct; identical to SEQ ID NO: 5470
  source 1..203: mol_type = other DNA

SEQ ID NO: 30358 - DNA, 203 bp, synthetic construct; identical to SEQ ID NO: 5471
  source 1..203: mol_type = other DNA

SEQ ID NO: 30359 - DNA, 203 bp, synthetic construct; identical to SEQ ID NO: 5481
  source 1..203: mol_type = other DNA

SEQ ID NO: 30360 - DNA, 203 bp, synthetic construct; identical to SEQ ID NO: 5482
  source 1..203: mol_type = other DNA

SEQ ID NO: 30361 - DNA, 203 bp, synthetic construct; identical to SEQ ID NO: 5483
  source 1..203: mol_type = other DNA

SEQ ID NO: 30362 - DNA, 203 bp, synthetic construct; identical to SEQ ID NO: 5484
  source 1..203: mol_type = other DNA

SEQ ID NO: 30363 - DNA, 203 bp, synthetic construct; identical to SEQ ID NO: 5485
  source 1..203: mol_type = other DNA

SEQ ID NO: 30364 - DNA, 203 bp, synthetic construct; identical to SEQ ID NO: 5486
  source 1..203: mol_type = other DNA

SEQ ID NO: 30365 - DNA, 203 bp, synthetic construct; identical to SEQ ID NO: 5487
  source 1..203: mol_type = other DNA

SEQ ID NO: 30366 - DNA, 203 bp, synthetic construct; identical to SEQ ID NO: 5488
  source 1..203: mol_type = other DNA

SEQ ID NO: 30367 - DNA, 203 bp, synthetic construct; identical to SEQ ID NO: 5489
  source 1..203: mol_type = other DNA

SEQ ID NO: 30368 - DNA, 203 bp, synthetic construct; identical to SEQ ID NO: 5490
  source 1..203: mol_type = other DNA

SEQ ID NO: 30369 - DNA, 203 bp, synthetic construct; identical to SEQ ID NO: 5491
  source 1..203: mol_type = other DNA

SEQ ID NO: 30370 - DNA, 203 bp, synthetic construct; identical to SEQ ID NO: 5492
  source 1..203: mol_type = other DNA

SEQ ID NO: 30371 - DNA, 203 bp, synthetic construct; identical to SEQ ID NO: 5493
  source 1..203: mol_type = other DNA

SEQ ID NO: 30372 - DNA, 203 bp, synthetic construct; identical to SEQ ID NO: 5510
  source 1..203: mol_type = other DNA

SEQ ID NO: 30373 - DNA, 203 bp, synthetic construct; identical to SEQ ID NO: 5511
  source 1..203: mol_type = other DNA

SEQ ID NO: 30374 - DNA, 203 bp, synthetic construct; identical to SEQ ID NO: 5512
  source 1..203: mol_type = other DNA

SEQ ID NO: 30375 - DNA, 203 bp, synthetic construct; identical to SEQ ID NO: 5515
  source 1..203: mol_type = other DNA

SEQ ID NO: 30376 - DNA, 203 bp, synthetic construct; identical to SEQ ID NO: 5516
  source 1..203: mol_type = other DNA

SEQ ID NO: 30377 - DNA, 203 bp, synthetic construct; identical to SEQ ID NO: 5517
  source 1..203: mol_type = other DNA

SEQ ID NO: 30378 - DNA, 203 bp, synthetic construct; identical to SEQ ID NO: 5518
  source 1..203: mol_type = other DNA

SEQ ID NO: 30379 - DNA, 203 bp, synthetic construct; identical to SEQ ID NO: 5519
  source 1..203: mol_type = other DNA

SEQ ID NO: 30380 - DNA, 203 bp, synthetic construct; identical to SEQ ID NO: 5544
  source 1..203: mol_type = other DNA

SEQ ID NO: 30381 - DNA, 203 bp, synthetic construct; identical to SEQ ID NO: 5550
  source 1..203: mol_type = other DNA

SEQ ID NO: 30382 - DNA, 203 bp, synthetic construct; identical to SEQ ID NO: 5552
  source 1..203: mol_type = other DNA

SEQ ID NO: 30383 - DNA, 203 bp, synthetic construct; identical to SEQ ID NO: 5556
  source 1..203: mol_type = other DNA

SEQ ID NO: 30384 - DNA, 203 bp, synthetic construct; identical to SEQ ID NO: 5557
  source 1..203: mol_type = other DNA

SEQ ID NO: 30385 - DNA, 203 bp, synthetic construct; identical to SEQ ID NO: 5558
  source 1..203: mol_type = other DNA

SEQ ID NO: 30386 - DNA, 203 bp, synthetic construct; identical to SEQ ID NO: 5568
  source 1..203: mol_type = other DNA

SEQ ID NO: 30387 - DNA, 203 bp, synthetic construct; identical to SEQ ID NO: 5569
  source 1..203: mol_type = other DNA

SEQ ID NO: 30388 - DNA, 203 bp, synthetic construct; identical to SEQ ID NO: 5570
  source 1..203: mol_type = other DNA

SEQ ID NO: 30389 - DNA, 203 bp, synthetic construct; identical to SEQ ID NO: 5571
  source 1..203: mol_type = other DNA

SEQ ID NO: 30390 - DNA, 203 bp, synthetic construct; identical to SEQ ID NO: 5572
  source 1..203: mol_type = other DNA

SEQ ID NO: 30391 - DNA, 203 bp, synthetic construct; identical to SEQ ID NO: 5573
  source 1..203: mol_type = other DNA

SEQ ID NO: 30392 - DNA, 203 bp, synthetic construct; identical to SEQ ID NO: 5574
  source 1..203: mol_type = other DNA

SEQ ID NO: 30393 - DNA, 203 bp, synthetic construct; identical to SEQ ID NO: 5575
  source 1..203: mol_type = other DNA

SEQ ID NO: 30394 - DNA, 203 bp, synthetic construct; identical to SEQ ID NO: 5576
  source 1..203: mol_type = other DNA

SEQ ID NO: 30395 - DNA, 203 bp, synthetic construct; identical to SEQ ID NO: 5577
  source 1..203: mol_type = other DNA

SEQ ID NO: 30396 - DNA, 203 bp, synthetic construct; identical to SEQ ID NO: 5578
  source 1..203: mol_type = other DNA

SEQ ID NO: 30397 - DNA, 203 bp, synthetic construct; identical to SEQ ID NO: 5579
  source 1..203: mol_type = other DNA

SEQ ID NO: 30398 - DNA, 203 bp, synthetic construct; identical to SEQ ID NO: 5580
  source 1..203: mol_type = other DNA

SEQ ID NO: 30399 - DNA, 203 bp, synthetic construct; identical to SEQ ID NO: 5581
  source 1..203: mol_type = other DNA

SEQ ID NO: 30400 - DNA, 203 bp, synthetic construct; identical to SEQ ID NO: 5582
  source 1..203: mol_type = other DNA

SEQ ID NO: 30401 - DNA, 203 bp, synthetic construct; identical to SEQ ID NO: 5583
  source 1..203: mol_type = other DNA

SEQ ID NO: 30402 - DNA, 203 bp, synthetic construct; identical to SEQ ID NO: 5584
  source 1..203: mol_type = other DNA

SEQ ID NO: 30403 - DNA, 203 bp, synthetic construct; identical to SEQ ID NO: 5592
  source 1..203: mol_type = other DNA

SEQ ID NO: 30404 - DNA, 203 bp, synthetic construct; identical to SEQ ID NO: 5593
  source 1..203: mol_type = other DNA

SEQ ID NO: 30405 - DNA, 203 bp, synthetic construct; identical to SEQ ID NO: 5594
  source 1..203: mol_type = other DNA

SEQ ID NO: 30406 - DNA, 203 bp, synthetic construct; identical to SEQ ID NO: 5595
  source 1..203: mol_type = other DNA

SEQ ID NO: 30407 - DNA, 203 bp, synthetic construct; identical to SEQ ID NO: 5596
  source 1..203: mol_type = other DNA

SEQ ID NO: 30408 - DNA, 203 bp, synthetic construct; identical to SEQ ID NO: 5597
  source 1..203: mol_type = other DNA

SEQ ID NO: 30409 - DNA, 203 bp, synthetic construct; identical to SEQ ID NO: 5598
  source 1..203: mol_type = other DNA

SEQ ID NO: 30410 - DNA, 203 bp, synthetic construct; identical to SEQ ID NO: 5599
  source 1..203: mol_type = other DNA

SEQ ID NO: 30411 - DNA, 203 bp, synthetic construct; identical to SEQ ID NO: 5603
  source 1..203: mol_type = other DNA

SEQ ID NO: 30412 - DNA, 203 bp, synthetic construct; identical to SEQ ID NO: 5607
  source 1..203: mol_type = other DNA

SEQ ID NO: 30413 - DNA, 203 bp, synthetic construct; identical to SEQ ID NO: 5608
  source 1..203: mol_type = other DNA

SEQ ID NO: 30414 - DNA, 203 bp, synthetic construct; identical to SEQ ID NO: 5613
  source 1..203: mol_type = other DNA

SEQ ID NO: 30415 - DNA, 203 bp, synthetic construct; identical to SEQ ID NO: 5614
  source 1..203: mol_type = other DNA

SEQ ID NO: 30416 - DNA, 203 bp, synthetic construct; identical to SEQ ID NO: 5615
  source 1..203: mol_type = other DNA

SEQ ID NO: 30417 - DNA, 203 bp, synthetic construct; identical to SEQ ID NO: 5616
  source 1..203: mol_type = other DNA

SEQ ID NO: 30418 - DNA, 203 bp, synthetic construct; identical to SEQ ID NO: 5617
  source 1..203: mol_type = other DNA

SEQ ID NO: 30419 - DNA, 203 bp, synthetic construct; identical to SEQ ID NO: 5618
  source 1..203: mol_type = other DNA

SEQ ID NO: 30420 - DNA, 203 bp, synthetic construct; identical to SEQ ID NO: 5619
  source 1..203: mol_type = other DNA

SEQ ID NO: 30421 - DNA, 203 bp, synthetic construct; identical to SEQ ID NO: 5620
  source 1..203: mol_type = other DNA

SEQ ID NO: 30422 - DNA, 203 bp, synthetic construct; identical to SEQ ID NO: 5621
  source 1..203: mol_type = other DNA

SEQ ID NO: 30423 - DNA, 203 bp, synthetic construct; identical to SEQ ID NO: 5622
  source 1..203: mol_type = other DNA

SEQ ID NO: 30424 - DNA, 203 bp, synthetic construct; identical to SEQ ID NO: 5627
  source 1..203: mol_type = other DNA

SEQ ID NO: 30425 - DNA, 203 bp, synthetic construct; identical to SEQ ID NO: 5628
  source 1..203: mol_type = other DNA

SEQ ID NO: 30426 - DNA, 203 bp, synthetic construct; identical to SEQ ID NO: 5629
  source 1..203: mol_type = other DNA

SEQ ID NO: 30427 - DNA, 203 bp, synthetic construct; identical to SEQ ID NO: 5630
  source 1..203: mol_type = other DNA

SEQ ID NO: 30428 - DNA, 203 bp, synthetic construct; identical to SEQ ID NO: 5631
  source 1..203: mol_type = other DNA

SEQ ID NO: 30429 - DNA, 203 bp, synthetic construct; identical to SEQ ID NO: 5632
  source 1..203: mol_type = other DNA

SEQ ID NO: 30430 - DNA, 203 bp, synthetic construct; identical to SEQ ID NO: 5633
  source 1..203: mol_type = other DNA

SEQ ID NO: 30431 - DNA, 203 bp, synthetic construct; identical to SEQ ID NO: 5634
  source 1..203: mol_type = other DNA

SEQ ID NO: 30432 - DNA, 203 bp, synthetic construct; identical to SEQ ID NO: 5635
  source 1..203: mol_type = other DNA

SEQ ID NO: 30433 - DNA, 203 bp, synthetic construct; identical to SEQ ID NO: 5636
  source 1..203: mol_type = other DNA

SEQ ID NO: 30434 - DNA, 203 bp, synthetic construct; identical to SEQ ID NO: 5637
  source 1..203: mol_type = other DNA

SEQ ID NO: 30435 - DNA, 203 bp, synthetic construct; identical to SEQ ID NO: 5638
  source 1..203: mol_type = other DNA

SEQ ID NO: 30436 - DNA, 203 bp, synthetic construct; identical to SEQ ID NO: 5639
  source 1..203: mol_type = other DNA

SEQ ID NO: 30437 - DNA, 203 bp, synthetic construct; identical to SEQ ID NO: 5640
  source 1..203: mol_type = other DNA

SEQ ID NO: 30438 - DNA, 203 bp, synthetic construct; identical to SEQ ID NO: 5641
  source 1..203: mol_type = other DNA

SEQ ID NO: 30439 - DNA, 203 bp, synthetic construct; identical to SEQ ID NO: 5642
  source 1..203: mol_type = other DNA

SEQ ID NO: 30440 - DNA, 203 bp, synthetic construct; identical to SEQ ID NO: 5643
  source 1..203: mol_type = other DNA

SEQ ID NO: 30441 - DNA, 203 bp, synthetic construct; identical to SEQ ID NO: 5644
  source 1..203: mol_type = other DNA

SEQ ID NO: 30442 - DNA, 203 bp, synthetic construct; identical to SEQ ID NO: 5645
  source 1..203: mol_type = other DNA

SEQ ID NO: 30443 - DNA, 203 bp, synthetic construct; identical to SEQ ID NO: 5676
  source 1..203: mol_type = other DNA

SEQ ID NO: 30444 - DNA, 203 bp, synthetic construct; identical to SEQ ID NO: 5677
  source 1..203: mol_type = other DNA

SEQ ID NO: 30445 - DNA, 203 bp, synthetic construct; identical to SEQ ID NO: 5678
  source 1..203: mol_type = other DNA

SEQ ID NO: 30446 - DNA, 203 bp, synthetic construct; identical to SEQ ID NO: 5679
  source 1..203: mol_type = other DNA

SEQ ID NO: 30447 - DNA, 203 bp, synthetic construct; identical to SEQ ID NO: 5682
  source 1..203: mol_type = other DNA

SEQ ID NO: 30448 - DNA, 203 bp, synthetic construct; identical to SEQ ID NO: 5687
  source 1..203: mol_type = other DNA

SEQ ID NO: 30449 - DNA, 203 bp, synthetic construct; identical to SEQ ID NO: 5688
  source 1..203: mol_type = other DNA

SEQ ID NO: 30450 - DNA, 203 bp, synthetic construct; identical to SEQ ID NO: 5689
  source 1..203: mol_type = other DNA

SEQ ID NO: 30451 - DNA, 203 bp, synthetic construct; identical to SEQ ID NO: 5691
  source 1..203: mol_type = other DNA

SEQ ID NO: 30452 - DNA, 203 bp, synthetic construct; identical to SEQ ID NO: 5692
  source 1..203: mol_type = other DNA

SEQ ID NO: 30453 - DNA, 203 bp, synthetic construct; identical to SEQ ID NO: 5693
  source 1..203: mol_type = other DNA

SEQ ID NO: 30454 - DNA, 203 bp, synthetic construct; identical to SEQ ID NO: 5694
  source 1..203: mol_type = other DNA

SEQ ID NO: 30455 - DNA, 203 bp, synthetic construct; identical to SEQ ID NO: 5695
  source 1..203: mol_type = other DNA

SEQ ID NO: 30456 - DNA, 203 bp, synthetic construct; identical to SEQ ID NO: 5696
  source 1..203: mol_type = other DNA

SEQ ID NO: 30457 - DNA, 203 bp, synthetic construct; identical to SEQ ID NO: 5697
  source 1..203: mol_type = other DNA

SEQ ID NO: 30458 - DNA, 203 bp, synthetic construct; identical to SEQ ID NO: 5706
  source 1..203: mol_type = other DNA

SEQ ID NO: 30459 - DNA, 203 bp, synthetic construct; identical to SEQ ID NO: 5707
  source 1..203: mol_type = other DNA

SEQ ID NO: 30460 - DNA, 203 bp, synthetic construct; identical to SEQ ID NO: 5708
  source 1..203: mol_type = other DNA

SEQ ID NO: 30461 - DNA, 203 bp, synthetic construct; identical to SEQ ID NO: 5709
  source 1..203: mol_type = other DNA

SEQ ID NO: 30462 - DNA, 203 bp, synthetic construct; identical to SEQ ID NO: 5711
  source 1..203: mol_type = other DNA

SEQ ID NO: 30463 - DNA, 203 bp, synthetic construct; identical to SEQ ID NO: 5712
  source 1..203: mol_type = other DNA

SEQ ID NO: 30464 - DNA, 203 bp, synthetic construct; identical to SEQ ID NO: 5713
  source 1..203: mol_type = other DNA

SEQ ID NO: 30465 - DNA, 203 bp, synthetic construct; identical to SEQ ID NO: 5714
  source 1..203: mol_type = other DNA

SEQ ID NO: 30466 - DNA, 203 bp, synthetic construct; identical to SEQ ID NO: 5715
  source 1..203: mol_type = other DNA

SEQ ID NO: 30467 - DNA, 203 bp, synthetic construct; identical to SEQ ID NO: 5716
  source 1..203: mol_type = other DNA

SEQ ID NO: 30468 - DNA, 203 bp, synthetic construct; identical to SEQ ID NO: 5717
  source 1..203: mol_type = other DNA

SEQ ID NO: 30469 - DNA, 203 bp, synthetic construct; identical to SEQ ID NO: 5718
  source 1..203: mol_type = other DNA

SEQ ID NO: 30470 - DNA, 203 bp, synthetic construct; identical to SEQ ID NO: 5724
  source 1..203: mol_type = other DNA

SEQ ID NO: 30471 - DNA, 203 bp, synthetic construct; identical to SEQ ID NO: 5725
  source 1..203: mol_type = other DNA

SEQ ID NO: 30472 - DNA, 203 bp, synthetic construct; identical to SEQ ID NO: 5726
  source 1..203: mol_type = other DNA

SEQ ID NO: 30473 - DNA, 203 bp, synthetic construct; identical to SEQ ID NO: 5727
  source 1..203: mol_type = other DNA

SEQ ID NO: 30474 - DNA, 203 bp, synthetic construct; identical to SEQ ID NO: 5728
  source 1..203: mol_type = other DNA

SEQ ID NO: 30475 - DNA, 203 bp, synthetic construct; identical to SEQ ID NO: 5729
  source 1..203: mol_type = other DNA

SEQ ID NO: 30476 - DNA, 203 bp, synthetic construct; identical to SEQ ID NO: 5730
  source 1..203: mol_type = other DNA

SEQ ID NO: 30477 - DNA, 203 bp, synthetic construct; identical to SEQ ID NO: 5731
  source 1..203: mol_type = other DNA

SEQ ID NO: 30478 - DNA, 203 bp, synthetic construct; identical to SEQ ID NO: 5732
  source 1..203: mol_type = other DNA

SEQ ID NO: 30479 - DNA, 203 bp, synthetic construct; identical to SEQ ID NO: 5740
  source 1..203: mol_type = other DNA

SEQ ID NO: 30480 - DNA, 203 bp, synthetic construct; identical to SEQ ID NO: 5741
  source 1..203: mol_type = other DNA

SEQ ID NO: 30481 - DNA, 203 bp, synthetic construct; identical to SEQ ID NO: 5742
  source 1..203: mol_type = other DNA

SEQ ID NO: 30482 - DNA, 203 bp, synthetic construct; identical to SEQ ID NO: 5746
  source 1..203: mol_type = other DNA

SEQ ID NO: 30483 - DNA, 203 bp, synthetic construct; identical to SEQ ID NO: 5781
  source 1..203: mol_type = other DNA

SEQ ID NO: 30484 - DNA, 203 bp, synthetic construct; identical to SEQ ID NO: 5783
  source 1..203: mol_type = other DNA

SEQ ID NO: 30485 - DNA, 203 bp, synthetic construct; identical to SEQ ID NO: 5798
  source 1..203: mol_type = other DNA

SEQ ID NO: 30486 - DNA, 203 bp, synthetic construct; identical to SEQ ID NO: 5799
  source 1..203: mol_type = other DNA

SEQ ID NO: 30487 - DNA, 203 bp, synthetic construct; identical to SEQ ID NO: 5800
  source 1..203: mol_type = other DNA

SEQ ID NO: 30488 - DNA, 203 bp, synthetic construct; identical to SEQ ID NO: 5801
  source 1..203: mol_type = other DNA

SEQ ID NO: 30489 - DNA, 203 bp, synthetic construct; identical to SEQ ID NO: 5802
  source 1..203: mol_type = other DNA

SEQ ID NO: 30490 - DNA, 203 bp, synthetic construct; identical to SEQ ID NO: 5803
  source 1..203: mol_type = other DNA

SEQ ID NO: 30491 - DNA, 203 bp, synthetic construct; identical to SEQ ID NO: 5804
  source 1..203: mol_type = other DNA

SEQ ID NO: 30492 - DNA, 203 bp, synthetic construct; identical to SEQ ID NO: 5842
  source 1..203: mol_type = other DNA

SEQ ID NO: 30493 - DNA, 203 bp, synthetic construct; identical to SEQ ID NO: 5843
  source 1..203: mol_type = other DNA

SEQ ID NO: 30494 - DNA, 203 bp, synthetic construct; identical to SEQ ID NO: 5844
  source 1..203: mol_type = other DNA

SEQ ID NO: 30495 - DNA, 203 bp, synthetic construct; identical to SEQ ID NO: 5845
  source 1..203: mol_type = other DNA

SEQ ID NO: 30496 - DNA, 203 bp, synthetic construct; identical to SEQ ID NO: 5846
  source 1..203: mol_type = other DNA

SEQ ID NO: 30497 - DNA, 203 bp, synthetic construct; identical to SEQ ID NO: 5847
  source 1..203: mol_type = other DNA

SEQ ID NO: 30498 - DNA, 203 bp, synthetic construct; identical to SEQ ID NO: 5848
  source 1..203: mol_type = other DNA

SEQ ID NO: 30499 - DNA, 203 bp, synthetic construct; identical to SEQ ID NO: 5849
  source 1..203: mol_type = other DNA

SEQ ID NO: 30500 - DNA, 203 bp, synthetic construct; identical to SEQ ID NO: 5850
  source 1..203: mol_type = other DNA

SEQ ID NO: 30501 - DNA, 203 bp, synthetic construct; identical to SEQ ID NO: 5851
  source 1..203: mol_type = other DNA

SEQ ID NO: 30502 - DNA, 203 bp, synthetic construct; identical to SEQ ID NO: 5852
  source 1..203: mol_type = other DNA

SEQ ID NO: 30503 - DNA, 203 bp, synthetic construct; identical to SEQ ID NO: 5853
  source 1..203: mol_type = other DNA

SEQ ID NO: 30504 - DNA, 203 bp, synthetic construct; identical to SEQ ID NO: 5870
  source 1..203: mol_type = other DNA

SEQ ID NO: 30505 - DNA, 203 bp, synthetic construct; identical to SEQ ID NO: 5921
  source 1..203: mol_type = other DNA

SEQ ID NO: 30506 - DNA, 203 bp, synthetic construct; identical to SEQ ID NO: 5922
  source 1..203: mol_type = other DNA

SEQ ID NO: 30507 - DNA, 203 bp, synthetic construct; identical to SEQ ID NO: 5923
  source 1..203: mol_type = other DNA

SEQ ID NO: 30508 - DNA, 203 bp, synthetic construct; identical to SEQ ID NO: 5942
  source 1..203: mol_type = other DNA

SEQ ID NO: 30509 - DNA, 203 bp, synthetic construct; identical to SEQ ID NO: 5943
  source 1..203: mol_type = other DNA

SEQ ID NO: 30510 - DNA, 203 bp, synthetic construct; identical to SEQ ID NO: 5944
  source 1..203: mol_type = other DNA

SEQ ID NO: 30511 - DNA, 203 bp, synthetic construct; identical to SEQ ID NO: 5945
  source 1..203: mol_type = other DNA

SEQ ID NO: 30512 - DNA, 203 bp, synthetic construct; identical to SEQ ID NO: 5958
  source 1..203: mol_type = other DNA

SEQ ID NO: 30513 - DNA, 203 bp, synthetic construct; identical to SEQ ID NO: 5959
  source 1..203: mol_type = other DNA

SEQ ID NO: 30514 - DNA, 203 bp, synthetic construct; identical to SEQ ID NO: 5960
  source 1..203: mol_type = other DNA

SEQ ID NO: 30515 - DNA, 203 bp, synthetic construct; identical to SEQ ID NO: 5961
  source 1..203: mol_type = other DNA

SEQ ID NO: 30516 - DNA, 203 bp, synthetic construct; identical to SEQ ID NO: 5962
  source 1..203: mol_type = other DNA

SEQ ID NO: 30517 - DNA, 203 bp, synthetic construct; identical to SEQ ID NO: 5963
  source 1..203: mol_type = other DNA

SEQ ID NO: 30518 - DNA, 203 bp, synthetic construct; identical to SEQ ID NO: 5964
  source 1..203: mol_type = other DNA

SEQ ID NO: 30519 - DNA, 203 bp, synthetic construct; identical to SEQ ID NO: 5969
  source 1..203: mol_type = other DNA

SEQ ID NO: 30520 - DNA, 203 bp, synthetic construct; identical to SEQ ID NO: 5971
  source 1..203: mol_type = other DNA

SEQ ID NO: 30521 - DNA, 203 bp, synthetic construct; identical to SEQ ID NO: 5989
  source 1..203: mol_type = other DNA

SEQ ID NO: 30522 - DNA, 203 bp, synthetic construct; identical to SEQ ID NO: 5997
  source 1..203: mol_type = other DNA

SEQ ID NO: 30523 - DNA, 203 bp, synthetic construct; identical to SEQ ID NO: 5998
  source 1..203: mol_type = other DNA

SEQ ID NO: 30524 - DNA, 203 bp, synthetic construct; identical to SEQ ID NO: 5999
  source 1..203: mol_type = other DNA

SEQ ID NO: 30525 - DNA, 203 bp, synthetic construct; identical to SEQ ID NO: 6000
  source 1..203: mol_type = other DNA

SEQ ID NO: 30526 - DNA, 203 bp, synthetic construct; identical to SEQ ID NO: 6001
  source 1..203: mol_type = other DNA

SEQ ID NO: 30527 - DNA, 203 bp, synthetic construct; identical to SEQ ID NO: 6002
  source 1..203: mol_type = other DNA

SEQ ID NO: 30528 - DNA, 203 bp, synthetic construct; identical to SEQ ID NO: 6003
  source 1..203: mol_type = other DNA

SEQ ID NO: 30529 - DNA, 203 bp, synthetic construct; identical to SEQ ID NO: 6004
  source 1..203: mol_type = other DNA

SEQ ID NO: 30530 - DNA, 203 bp, synthetic construct; identical to SEQ ID NO: 6005
  source 1..203: mol_type = other DNA

SEQ ID NO: 30531 - DNA, 203 bp, synthetic construct; identical to SEQ ID NO: 6006
  source 1..203: mol_type = other DNA

SEQ ID NO: 30532 - DNA, 203 bp, synthetic construct; identical to SEQ ID NO: 6007
  source 1..203: mol_type = other DNA

SEQ ID NO: 30533 - DNA, 203 bp, synthetic construct; identical to SEQ ID NO: 6053
  source 1..203: mol_type = other DNA

SEQ ID NO: 30534 - DNA, 203 bp, synthetic construct; identical to SEQ ID NO: 6054
  source 1..203: mol_type = other DNA

SEQ ID NO: 30535 - DNA, 203 bp, synthetic construct; identical to SEQ ID NO: 6055
  source 1..203: mol_type = other DNA

SEQ ID NO: 30536 - DNA, 203 bp, synthetic construct; identical to SEQ ID NO: 6056
  source 1..203: mol_type = other DNA

SEQ ID NO: 30537 - DNA, 203 bp, synthetic construct; identical to SEQ ID NO: 6057
  source 1..203: mol_type = other DNA

SEQ ID NO: 30538 - DNA, 203 bp, synthetic construct; identical to SEQ ID NO: 6058
  source 1..203: mol_type = other DNA

SEQ ID NO: 30539 - DNA, 203 bp, synthetic construct; identical to SEQ ID NO: 6059
  source 1..203: mol_type = other DNA

SEQ ID NO: 30540 - DNA, 203 bp, synthetic construct; identical to SEQ ID NO: 6060
  source 1..203: mol_type = other DNA

SEQ ID NO: 30541 - DNA, 203 bp, synthetic construct; identical to SEQ ID NO: 6061
  source 1..203: mol_type = other DNA

SEQ ID NO: 30542 - DNA, 203 bp, synthetic construct; identical to SEQ ID NO: 6062
  source 1..203: mol_type = other DNA

SEQ ID NO: 30543 - DNA, 203 bp, synthetic construct; identical to SEQ ID NO: 6063
  source 1..203: mol_type = other DNA

SEQ ID NO: 30544 - DNA, 203 bp, synthetic construct; identical to SEQ ID NO: 6064
  source 1..203: mol_type = other DNA

SEQ ID NO: 30545 - DNA, 203 bp, synthetic construct; identical to SEQ ID NO: 6065
  source 1..203: mol_type = other DNA

SEQ ID NO: 30546 - DNA, 203 bp, synthetic construct; identical to SEQ ID NO: 6089
  source 1..203: mol_type = other DNA

SEQ ID NO: 30547 - DNA, 203 bp, synthetic construct; identical to SEQ ID NO: 6150
  source 1..203: mol_type = other DNA

SEQ ID NO: 30548 - DNA, 203 bp, synthetic construct; identical to SEQ ID NO: 6164
  source 1..203: mol_type = other DNA

SEQ ID NO: 30549 - DNA, 203 bp, synthetic construct; identical to SEQ ID NO: 6166
  source 1..203: mol_type = other DNA

SEQ ID NO: 30550 - DNA, 203 bp, synthetic construct; identical to SEQ ID NO: 6168
  source 1..203: mol_type = other DNA

SEQ ID NO: 30551 - DNA, 203 bp, synthetic construct; identical to SEQ ID NO: 6169
  source 1..203: mol_type = other DNA

SEQ ID NO: 30552 - DNA, 203 bp, synthetic construct; identical to SEQ ID NO: 6170
  source 1..203: mol_type = other DNA

SEQ ID NO: 30553 - DNA, 203 bp, synthetic construct; identical to SEQ ID NO: 6171
  source 1..203: mol_type = other DNA

SEQ ID NO: 30554 - DNA, 203 bp, synthetic construct; identical to SEQ ID NO: 6172
  source 1..203: mol_type = other DNA

SEQ ID NO: 30555 - DNA, 203 bp, synthetic construct; identical to SEQ ID NO: 6173
  source 1..203: mol_type = other DNA

SEQ ID NO: 30556 - DNA, 203 bp, synthetic construct; identical to SEQ ID NO: 6174
  source 1..203: mol_type = other DNA

SEQ ID NO: 30557 - DNA, 203 bp, synthetic construct; identical to SEQ ID NO: 6225
  source 1..203: mol_type = other DNA

SEQ ID NO: 30558 - DNA, 203 bp, synthetic construct; identical to SEQ ID NO: 6227
  source 1..203: mol_type = other DNA

SEQ ID NO: 30559 - DNA, 203 bp, synthetic construct; identical to SEQ ID NO: 6228
  source 1..203: mol_type = other DNA

SEQ ID NO: 30560 - DNA, 203 bp, synthetic construct; identical to SEQ ID NO: 6229
  source 1..203: mol_type = other DNA

SEQ ID NO: 30561 - DNA, 203 bp, synthetic construct; identical to SEQ ID NO: 6230
  source 1..203: mol_type = other DNA

SEQ ID NO: 30562 - DNA, 203 bp, synthetic construct; identical to SEQ ID NO: 6231
  source 1..203: mol_type = other DNA

SEQ ID NO: 30563 - DNA, 203 bp, synthetic construct; identical to SEQ ID NO: 6232
  source 1..203: mol_type = other DNA

SEQ ID NO: 30564 - DNA, 203 bp, synthetic construct; identical to SEQ ID NO: 6233
  source 1..203: mol_type = other DNA

SEQ ID NO: 30565 - DNA, 203 bp, synthetic construct; identical to SEQ ID NO: 6234
  source 1..203: mol_type = other DNA

SEQ ID NO: 30566 - DNA, 203 bp, synthetic construct; identical to SEQ ID NO: 6235
  source 1..203: mol_type = other DNA

SEQ ID NO: 30567 - DNA, 203 bp, synthetic construct; identical to SEQ ID NO: 6236
  source 1..203: mol_type = other DNA

SEQ ID NO: 30568 - DNA, 203 bp, synthetic construct; identical to SEQ ID NO: 6237
  source 1..203: mol_type = other DNA

SEQ ID NO: 30569 - DNA, 203 bp, synthetic construct; identical to SEQ ID NO: 6238
  source 1..203: mol_type = other DNA

SEQ ID NO: 30570 - DNA, 203 bp, synthetic construct; identical to SEQ ID NO: 6239
  source 1..203: mol_type = other DNA

SEQ ID NO: 30571 - DNA, 203 bp, synthetic construct; identical to SEQ ID NO: 6240
  source 1..203: mol_type = other DNA

SEQ ID NO: 30572 - DNA, 203 bp, synthetic construct; identical to SEQ ID NO: 6241
  source 1..203: mol_type = other DNA

SEQ ID NO: 30573 - DNA, 203 bp, synthetic construct; identical to SEQ ID NO: 6242
  source 1..203: mol_type = other DNA

SEQ ID NO: 30574 - DNA, 203 bp, synthetic construct; identical to SEQ ID NO: 6243
  source 1..203: mol_type = other DNA

SEQ ID NO: 30575 - DNA, 203 bp, synthetic construct; identical to SEQ ID NO: 6244
  source 1..203: mol_type = other DNA

SEQ ID NO: 30576 - DNA, 203 bp, synthetic construct; identical to SEQ ID NO: 6245
  source 1..203: mol_type = other DNA

SEQ ID NO: 30577 - DNA, 203 bp, synthetic construct; identical to SEQ ID NO: 6246
  source 1..203: mol_type = other DNA

SEQ ID NO: 30578 - DNA, 203 bp, synthetic construct; identical to SEQ ID NO: 6248
  source 1..203: mol_type = other DNA

SEQ ID NO: 30579 - DNA, 203 bp, synthetic construct; identical to SEQ ID NO: 6249
  source 1..203: mol_type = other DNA

SEQ ID NO: 30580 - DNA, 203 bp, synthetic construct; identical to SEQ ID NO: 6250
  source 1..203: mol_type = other DNA

SEQ ID NO: 30581 - DNA, 203 bp, synthetic construct; identical to SEQ ID NO: 6251
  source 1..203: mol_type = other DNA

SEQ ID NO: 30582 - DNA, 203 bp, synthetic construct; identical to SEQ ID NO: 6252
  source 1..203: mol_type = other DNA

SEQ ID NO: 30583 - DNA, 203 bp, synthetic construct; identical to SEQ ID NO: 6253
  source 1..203: mol_type = other DNA

SEQ ID NO: 30584 - DNA, 203 bp, synthetic construct; identical to SEQ ID NO: 6254
  source 1..203: mol_type = other DNA

SEQ ID NO: 30585 - DNA, 203 bp, synthetic construct; identical to SEQ ID NO: 6255
  source 1..203: mol_type = other DNA

SEQ ID NO: 30586 - DNA, 203 bp, synthetic construct; identical to SEQ ID NO: 6256
  source 1..203: mol_type = other DNA

SEQ ID NO: 30587 - DNA, 203 bp, synthetic construct; identical to SEQ ID NO: 6257
  source 1..203: mol_type = other DNA

SEQ ID NO: 30588 - DNA, 203 bp, synthetic construct; identical to SEQ ID NO: 6258
  source 1..203: mol_type = other DNA

SEQ ID NO: 30589 - DNA, 203 bp, synthetic construct; identical to SEQ ID NO: 6259
  source 1..203: mol_type = other DNA

SEQ ID NO: 30590 - DNA, 203 bp, synthetic construct; identical to SEQ ID NO: 6260
  source 1..203: mol_type = other DNA

SEQ ID NO: 30591 - DNA, 203 bp, synthetic construct; identical to SEQ ID NO: 6261
  source 1..203: mol_type = other DNA

SEQ ID NO: 30592 - DNA, 203 bp, synthetic construct; identical to SEQ ID NO: 6262
  source 1..203: mol_type = other DNA

SEQ ID NO: 30593 - DNA, 203 bp, synthetic construct; identical to SEQ ID NO: 6263
  source 1..203: mol_type = other DNA

SEQ ID NO: 30594 - DNA, 203 bp, synthetic construct; identical to SEQ ID NO: 6264
  source 1..203: mol_type = other DNA

SEQ ID NO: 30595 - DNA, 203 bp, synthetic construct; identical to SEQ ID NO: 6265
  source 1..203: mol_type = other DNA

SEQ ID NO: 30596 - DNA, 203 bp, synthetic construct; identical to SEQ ID NO: 6266
  source 1..203: mol_type = other DNA

SEQ ID NO: 30597 - DNA, 203 bp, synthetic construct; identical to SEQ ID NO: 6291
  source 1..203: mol_type = other DNA

SEQ ID NO: 30598 - DNA, 203 bp, synthetic construct; identical to SEQ ID NO: 6301
  source 1..203: mol_type = other DNA

SEQ ID NO: 30599 - DNA, 203 bp, synthetic construct; identical to SEQ ID NO: 6302
  source 1..203: mol_type = other DNA

SEQ ID NO: 30600 - DNA, 203 bp, synthetic construct; identical to SEQ ID NO: 6303
  source 1..203: mol_type = other DNA

SEQ ID NO: 30601 - DNA, 203 bp, synthetic construct; identical to SEQ ID NO: 6304
  source 1..203: mol_type = other DNA

SEQ ID NO: 30602 - DNA, 203 bp, synthetic construct; identical to SEQ ID NO: 6305
  source 1..203: mol_type = other DNA

SEQ ID NO: 30603 - DNA, 203 bp, synthetic construct; identical to SEQ ID NO: 6306
  source 1..203: mol_type = other DNA

SEQ ID NO: 30604 - DNA, 203 bp, synthetic construct; identical to SEQ ID NO: 6307
  source 1..203: mol_type = other DNA

SEQ ID NO: 30605 - DNA, 203 bp, synthetic construct; identical to SEQ ID NO: 6308
  source 1..203: mol_type = other DNA

SEQ ID NO: 30606 - DNA, 203 bp, synthetic construct; identical to SEQ ID NO: 6309
  source 1..203: mol_type = other DNA

SEQ ID NO: 30607 - DNA, 203 bp, synthetic construct; identical to SEQ ID NO: 6310
  source 1..203: mol_type = other DNA

SEQ ID NO: 30608 - DNA, 203 bp, synthetic construct; identical to SEQ ID NO: 6311
  source 1..203: mol_type = other DNA

SEQ ID NO: 30609 - DNA, 203 bp, synthetic construct; identical to SEQ ID NO: 6312
  source 1..203: mol_type = other DNA

SEQ ID NO: 30610 - DNA, 203 bp, synthetic construct; identical to SEQ ID NO: 6313
  source 1..203: mol_type = other DNA

SEQ ID NO: 30611 - DNA, 203 bp, synthetic construct; identical to SEQ ID NO: 6314
  source 1..203: mol_type = other DNA

SEQ ID NO: 30612 - DNA, 203 bp, synthetic construct; identical to SEQ ID NO: 6315
  source 1..203: mol_type = other DNA

SEQ ID NO: 30613 - DNA, 203 bp, synthetic construct; identical to SEQ ID NO: 6316
  source 1..203: mol_type = other DNA

SEQ ID NO: 30614 - DNA, 203 bp, synthetic construct; identical to SEQ ID NO: 6317
  source 1..203: mol_type = other DNA

SEQ ID NO: 30615 - DNA, 203 bp, synthetic construct; identical to SEQ ID NO: 6318
  source 1..203: mol_type = other DNA

SEQ ID NO: 30616 - DNA, 203 bp, synthetic construct; identical to SEQ ID NO: 6319
  source 1..203: mol_type = other DNA

SEQ ID NO: 30617 - DNA, 203 bp, synthetic construct; identical to SEQ ID NO: 6320
  source 1..203: mol_type = other DNA

SEQ ID NO: 30618 - DNA, 203 bp, synthetic construct; identical to SEQ ID NO: 6321
  source 1..203: mol_type = other DNA

SEQ ID NO: 30619 - DNA, 203 bp, synthetic construct; identical to SEQ ID NO: 6322
  source 1..203: mol_type = other DNA

SEQ ID NO: 30620 - DNA, 203 bp, synthetic construct; identical to SEQ ID NO: 6323
  source 1..203: mol_type = other DNA

SEQ ID NO: 30621 - DNA, 203 bp, synthetic construct; identical to SEQ ID NO: 6324
  source 1..203: mol_type = other DNA

SEQ ID NO: 30622 - DNA, 203 bp, synthetic construct; identical to SEQ ID NO: 6325
  source 1..203: mol_type = other DNA

SEQ ID NO: 30623 - DNA, 203 bp, synthetic construct; identical to SEQ ID NO: 6326
  source 1..203: mol_type = other DNA

SEQ ID NO: 30624 - DNA, 203 bp, synthetic construct; identical to SEQ ID NO: 6327
  source 1..203: mol_type = other DNA

SEQ ID NO: 30625 - DNA, 203 bp, synthetic construct; identical to SEQ ID NO: 6328
  source 1..203: mol_type = other DNA

SEQ ID NO: 30626 - DNA, 203 bp, synthetic construct; identical to SEQ ID NO: 6329
  source 1..203: mol_type = other DNA

SEQ ID NO: 30627 - DNA, 203 bp, synthetic construct; identical to SEQ ID NO: 6330
  source 1..203: mol_type = other DNA

SEQ ID NO: 30628 - DNA, 203 bp, synthetic construct; identical to SEQ ID NO: 6331
  source 1..203: mol_type = other DNA

SEQ ID NO: 30629 - DNA, 203 bp, synthetic construct; identical to SEQ ID NO: 6332
  source 1..203: mol_type = other DNA

SEQ ID NO: 30630 - DNA, 203 bp, synthetic construct; identical to SEQ ID NO: 6333
  source 1..203: mol_type = other DNA

SEQ ID NO: 30631 - DNA, 203 bp, synthetic construct; identical to SEQ ID NO: 6334
  source 1..203: mol_type = other DNA

SEQ ID NO: 30632 - DNA, 203 bp, synthetic construct; identical to SEQ ID NO: 6335
  source 1..203: mol_type = other DNA

SEQ ID NO: 30633 - DNA, 203 bp, synthetic construct; identical to SEQ ID NO: 6336
  source 1..203: mol_type = other DNA

SEQ ID NO: 30634 - DNA, 203 bp, synthetic construct; identical to SEQ ID NO: 6337
  source 1..203: mol_type = other DNA

SEQ ID NO: 30635 - DNA, 203 bp, synthetic construct; identical to SEQ ID NO: 6338
  source 1..203: mol_type = other DNA

SEQ ID NO: 30636 - DNA, 203 bp, synthetic construct; identical to SEQ ID NO: 6339
  source 1..203: mol_type = other DNA

SEQ ID NO: 30637 - DNA, 203 bp, synthetic construct; identical to SEQ ID NO: 6340
  source 1..203: mol_type = other DNA

SEQ ID NO: 30638 - DNA, 203 bp, synthetic construct; identical to SEQ ID NO: 6341
  source 1..203: mol_type = other DNA

SEQ ID NO: 30639 - DNA, 203 bp, synthetic construct; identical to SEQ ID NO: 6342
  source 1..203: mol_type = other DNA

SEQ ID NO: 30640 - DNA, 203 bp, synthetic construct; identical to SEQ ID NO: 6343
  source 1..203: mol_type = other DNA

SEQ ID NO: 30641 - DNA, 203 bp, synthetic construct; identical to SEQ ID NO: 6344
  source 1..203: mol_type = other DNA

SEQ ID NO: 30642 - DNA, 203 bp, synthetic construct; identical to SEQ ID NO: 6345
  source 1..203: mol_type = other DNA

SEQ ID NO: 30643 - DNA, 203 bp, synthetic construct; identical to SEQ ID NO: 6346
  source 1..203: mol_type = other DNA

SEQ ID NO: 30644 - DNA, 203 bp, synthetic construct; identical to SEQ ID NO: 6347
  source 1..203: mol_type = other DNA

SEQ ID NO: 30645 - DNA, 203 bp, synthetic construct; identical to SEQ ID NO: 6348
  source 1..203: mol_type = other DNA

SEQ ID NO: 30646 - DNA, 203 bp, synthetic construct; identical to SEQ ID NO: 6351
  source 1..203: mol_type = other DNA

SEQ ID NO: 30647 - DNA, 203 bp, synthetic construct; identical to SEQ ID NO: 6373
  source 1..203: mol_type = other DNA

SEQ ID NO: 30648 - DNA, 203 bp, synthetic construct; identical to SEQ ID NO: 6377
  source 1..203: mol_type = other DNA

SEQ ID NO: 30649 - DNA, 203 bp, synthetic construct; identical to SEQ ID NO: 6378
  source 1..203: mol_type = other DNA

SEQ ID NO: 30650 - DNA, 203 bp, synthetic construct; identical to SEQ ID NO: 6379
  source 1..203: mol_type = other DNA

SEQ ID NO: 30651 - DNA, 203 bp, synthetic construct; identical to SEQ ID NO: 6380
  source 1..203: mol_type = other DNA

SEQ ID NO: 30652 - DNA, 203 bp, synthetic construct; identical to SEQ ID NO: 6381
  source 1..203: mol_type = other DNA

SEQ ID NO: 30653 - DNA, 203 bp, synthetic construct; identical to SEQ ID NO: 6382
  source 1..203: mol_type = other DNA

SEQ ID NO: 30654 - DNA, 203 bp, synthetic construct; identical to SEQ ID NO: 6383
  source 1..203: mol_type = other DNA

SEQ ID NO: 30655 - DNA, 203 bp, synthetic construct; identical to SEQ ID NO: 6384
  source 1..203: mol_type = other DNA

SEQ ID NO: 30656 - DNA, 203 bp, synthetic construct; identical to SEQ ID NO: 6385
  source 1..203: mol_type = other DNA

SEQ ID NO: 30657 - DNA, 203 bp, synthetic construct; identical to SEQ ID NO: 6388
  source 1..203: mol_type = other DNA

SEQ ID NO: 30658 - DNA, 203 bp, synthetic construct; identical to SEQ ID NO: 6389
  source 1..203: mol_type = other DNA

SEQ ID NO: 30659 - DNA, 203 bp, synthetic construct; identical to SEQ ID NO: 6390
  source 1..203: mol_type = other DNA

SEQ ID NO: 30660 - DNA, 203 bp, synthetic construct; identical to SEQ ID NO: 6391
  source 1..203: mol_type = other DNA

SEQ ID NO: 30661 - DNA, 203 bp, synthetic construct; identical to SEQ ID NO: 6406
  source 1..203: mol_type = other DNA

SEQ ID NO: 30662 - DNA, 203 bp, synthetic construct; identical to SEQ ID NO: 6407
  source 1..203: mol_type = other DNA

SEQ ID NO: 30663 - DNA, 203 bp, synthetic construct; identical to SEQ ID NO: 6409
  source 1..203: mol_type = other DNA

SEQ ID NO: 30664 - DNA, 203 bp, synthetic construct; identical to SEQ ID NO: 6410
  source 1..203: mol_type = other DNA

SEQ ID NO: 30665 - DNA, 203 bp, synthetic construct; identical to SEQ ID NO: 6411
  source 1..203: mol_type = other DNA

SEQ ID NO: 30666 - DNA, 203 bp, synthetic construct; identical to SEQ ID NO: 6412
  source 1..203: mol_type = other DNA

SEQ ID NO: 30667 - DNA, 203 bp, synthetic construct; identical to SEQ ID NO: 6413
  source 1..203: mol_type = other DNA

SEQ ID NO: 30668 - DNA, 203 bp, synthetic construct; identical to SEQ ID NO: 6414
  source 1..203: mol_type = other DNA

SEQ ID NO: 30669 - DNA, 203 bp, synthetic construct; identical to SEQ ID NO: 6415
  source 1..203: mol_type = other DNA

SEQ ID NO: 30670 - DNA, 203 bp, synthetic construct; identical to SEQ ID NO: 6416
  source 1..203: mol_type = other DNA

SEQ ID NO: 30671 - DNA, 203 bp, synthetic construct; identical to SEQ ID NO: 6417
  source 1..203: mol_type = other DNA

SEQ ID NO: 30672 - DNA, 203 bp, synthetic construct; identical to SEQ ID NO: 6418
  source 1..203: mol_type = other DNA

SEQ ID NO: 30673 - DNA, 203 bp, synthetic construct; identical to SEQ ID NO: 6425
  source 1..203: mol_type = other DNA

SEQ ID NO: 30674 - DNA, 203 bp, synthetic construct; identical to SEQ ID NO: 6426
  source 1..203: mol_type = other DNA

SEQ ID NO: 30675 - DNA, 203 bp, synthetic construct; identical to SEQ ID NO: 6427
  source 1..203: mol_type = other DNA

SEQ ID NO: 30676 - DNA, 203 bp, synthetic construct; identical to SEQ ID NO: 6428
  source 1..203: mol_type = other DNA

SEQ ID NO: 30677 - DNA, 203 bp, synthetic construct; identical to SEQ ID NO: 6429
  source 1..203: mol_type = other DNA

SEQ ID NO: 30678 - DNA, 203 bp, synthetic construct; identical to SEQ ID NO: 6430
  source 1..203: mol_type = other DNA

SEQ ID NO: 30679 - DNA, 203 bp, synthetic construct; identical to SEQ ID NO: 6431
  source 1..203: mol_type = other DNA

SEQ ID NO: 30680 - DNA, 203 bp, synthetic construct; identical to SEQ ID NO: 6432
  source 1..203: mol_type = other DNA

SEQ ID NO: 30681 - DNA, 203 bp, synthetic construct; identical to SEQ ID NO: 6433
  source 1..203: mol_type = other DNA

SEQ ID NO: 30682 - DNA, 203 bp, synthetic construct; identical to SEQ ID NO: 6434
  source 1..203: mol_type = other DNA

SEQ ID NO: 30683 - DNA, 203 bp, synthetic construct; identical to SEQ ID NO: 6437
  source 1..203: mol_type = other DNA

SEQ ID NO: 30684 - DNA, 203 bp, synthetic construct; identical to SEQ ID NO: 6438
  source 1..203: mol_type = other DNA

SEQ ID NO: 30685 - DNA, 203 bp, synthetic construct; identical to SEQ ID NO: 6439
  source 1..203: mol_type = other DNA

SEQ ID NO: 30686 - DNA, 203 bp, synthetic construct; identical to SEQ ID NO: 6440
  source 1..203: mol_type = other DNA

SEQ ID NO: 30687 - DNA, 203 bp, synthetic construct; identical to SEQ ID NO: 6441
  source 1..203: mol_type = other DNA

SEQ ID NO: 30688 - DNA, 203 bp, synthetic construct; identical to SEQ ID NO: 6442
  source 1..203: mol_type = other DNA

SEQ ID NO: 30689 - DNA, 203 bp, synthetic construct; identical to SEQ ID NO: 6443
  source 1..203: mol_type = other DNA

SEQ ID NO: 30690 - DNA, 203 bp, synthetic construct; identical to SEQ ID NO: 6444
  source 1..203: mol_type = other DNA

SEQ ID NO: 30691 - DNA, 203 bp, synthetic construct; identical to SEQ ID NO: 6445
  source 1..203: mol_type = other DNA

SEQ ID NO: 30692 - DNA, 203 bp, synthetic construct; identical to SEQ ID NO: 6446
  source 1..203: mol_type = other DNA

SEQ ID NO: 30693 - DNA, 203 bp, synthetic construct; identical to SEQ ID NO: 6447
  source 1..203: mol_type = other DNA

SEQ ID NO: 30694 - DNA, 203 bp, synthetic construct; identical to SEQ ID NO: 6448
  source 1..203: mol_type = other DNA

SEQ ID NO: 30695 - DNA, 203 bp, synthetic construct; identical to SEQ ID NO: 6449
  source 1..203: mol_type = other DNA

SEQ ID NO: 30696 - DNA, 203 bp, synthetic construct; identical to SEQ ID NO: 6469
  source 1..203: mol_type = other DNA

SEQ ID NO: 30697 - DNA, 203 bp, synthetic construct; identical to SEQ ID NO: 6470
  source 1..203: mol_type = other DNA

SEQ ID NO: 30698 - DNA, 203 bp, synthetic construct; identical to SEQ ID NO: 6471
  source 1..203: mol_type = other DNA

SEQ ID NO: 30699 - DNA, 203 bp, synthetic construct; identical to SEQ ID NO: 6472
  source 1..203: mol_type = other DNA

SEQ ID NO: 30700 - DNA, 203 bp, synthetic construct; identical to SEQ ID NO: 6473
  source 1..203: mol_type = other DNA

SEQ ID NO: 30701 - DNA, 203 bp, synthetic construct; identical to SEQ ID NO: 6474
  source 1..203: mol_type = other DNA

SEQ ID NO: 30702 - DNA, 203 bp, synthetic construct; identical to SEQ ID NO: 6475
  source 1..203: mol_type = other DNA

SEQ ID NO: 30703 - DNA, 203 bp, synthetic construct; identical to SEQ ID NO: 6476
  source 1..203: mol_type = other DNA

SEQ ID NO: 30704 - DNA, 203 bp, synthetic construct; identical to SEQ ID NO: 6477
  source 1..203: mol_type = other DNA

SEQ ID NO: 30705 - DNA, 203 bp, synthetic construct; identical to SEQ ID NO: 6478
  source 1..203: mol_type = other DNA

SEQ ID NO: 30706 - DNA, 203 bp, synthetic construct; identical to SEQ ID NO: 6479
  source 1..203: mol_type = other DNA

SEQ ID NO: 30707 - DNA, 203 bp, synthetic construct; identical to SEQ ID NO: 6480
  source 1..203: mol_type = other DNA

SEQ ID NO: 30708 - DNA, 203 bp, synthetic construct; identical to SEQ ID NO: 6481
  source 1..203: mol_type = other DNA

SEQ ID NO: 30709 - DNA, 203 bp, synthetic construct; identical to SEQ ID NO: 6537
  source 1..203: mol_type = other DNA

SEQ ID NO: 30710 - DNA, 203 bp, synthetic construct; identical to SEQ ID NO: 6545
  source 1..203: mol_type = other DNA

SEQ ID NO: 30711 - DNA, 203 bp, synthetic construct; identical to SEQ ID NO: 6553
  source 1..203: mol_type = other DNA

SEQ ID NO: 30712 - DNA, 203 bp, synthetic construct; identical to SEQ ID NO: 6554
  source 1..203: mol_type = other DNA

SEQ ID NO: 30713 - DNA, 203 bp, synthetic construct; identical to SEQ ID NO: 6555
  source 1..203: mol_type = other DNA

SEQ ID NO: 30714 - DNA, 203 bp, synthetic construct; identical to SEQ ID NO: 6556
  source 1..203: mol_type = other DNA

SEQ ID NO: 30715 - DNA, 203 bp, synthetic construct; identical to SEQ ID NO: 6557
  source 1..203: mol_type = other DNA

SEQ ID NO: 30716 - DNA, 203 bp, synthetic construct; identical to SEQ ID NO: 6558
  source 1..203: mol_type = other DNA

SEQ ID NO: 30717 - DNA, 203 bp, synthetic construct; identical to SEQ ID NO: 6559
  source 1..203: mol_type = other DNA

SEQ ID NO: 30718 - DNA, 203 bp, synthetic construct; identical to SEQ ID NO: 6560
  source 1..203: mol_type = other DNA

SEQ ID NO: 30719 - DNA, 203 bp, synthetic construct; identical to SEQ ID NO: 6561
  source 1..203: mol_type = other DNA

SEQ ID NO: 30720 - DNA, 203 bp, synthetic construct; identical to SEQ ID NO: 6562
  source 1..203: mol_type = other DNA

SEQ ID NO: 30721 - DNA, 203 bp, synthetic construct; identical to SEQ ID NO: 6563
  source 1..203: mol_type = other DNA

SEQ ID NO: 30722 - DNA, 203 bp, synthetic construct; identical to SEQ ID NO: 6564
  source 1..203: mol_type = other DNA

SEQ ID NO: 30723 - DNA, 203 bp, synthetic construct; identical to SEQ ID NO: 6565
  source 1..203: mol_type = other DNA

SEQ ID NO: 30724 - DNA, 203 bp, synthetic construct; identical to SEQ ID NO: 6566
  source 1..203: mol_type = other DNA

SEQ ID NO: 30725 - DNA, 203 bp, synthetic construct; identical to SEQ ID NO: 6568
  source 1..203: mol_type = other DNA

SEQ ID NO: 30726 - DNA, 203 bp, synthetic construct; identical to SEQ ID NO: 6573
  source 1..203: mol_type = other DNA

SEQ ID NO: 30727 - DNA, 203 bp, synthetic construct; identical to SEQ ID NO: 6574
  source 1..203: mol_type = other DNA

SEQ ID NO: 30728 - DNA, 203 bp, synthetic construct; identical to SEQ ID NO: 6592
  source 1..203: mol_type = other DNA

SEQ ID NO: 30729 - DNA, 203 bp, synthetic construct; identical to SEQ ID NO: 6595
  source 1..203: mol_type = other DNA

SEQ ID NO: 30730 - DNA, 203 bp, synthetic construct; identical to SEQ ID NO: 6596
  source 1..203: mol_type = other DNA

SEQ ID NO: 30731 - DNA, 203 bp, synthetic construct; identical to SEQ ID NO: 6597
  source 1..203: mol_type = other DNA

SEQ ID NO: 30732 - DNA, 203 bp, synthetic construct; identical to SEQ ID NO: 6598
  source 1..203: mol_type = other DNA

SEQ ID NO: 30733 - DNA, 203 bp, synthetic construct; identical to SEQ ID NO: 6599
  source 1..203: mol_type = other DNA

SEQ ID NO: 30734 - DNA, 203 bp, synthetic construct; identical to SEQ ID NO: 6600
  source 1..203: mol_type = other DNA

SEQ ID NO: 30735 - DNA, 203 bp, synthetic construct; identical to SEQ ID NO: 6601
  source 1..203: mol_type = other DNA

SEQ ID NO: 30736 - DNA, 203 bp, synthetic construct; identical to SEQ ID NO: 6602
  source 1..203: mol_type = other DNA

SEQ ID NO: 30737 - DNA, 203 bp, synthetic construct; identical to SEQ ID NO: 6603
  source 1..203: mol_type = other DNA

SEQ ID NO: 30738 - DNA, 203 bp, synthetic construct; identical to SEQ ID NO: 6604
  source 1..203: mol_type = other DNA

SEQ ID NO: 30739 - DNA, 203 bp, synthetic construct; identical to SEQ ID NO: 6605
  source 1..203: mol_type = other DNA

SEQ ID NO: 30740 - DNA, 203 bp, synthetic construct; identical to SEQ ID NO: 6606
  source 1..203: mol_type = other DNA

SEQ ID NO: 30741 - DNA, 203 bp, synthetic construct; identical to SEQ ID NO: 6607
  source 1..203: mol_type = other DNA

SEQ ID NO: 30742 - DNA, 203 bp, synthetic construct; identical to SEQ ID NO: 6608
  source 1..203: mol_type = other DNA

SEQ ID NO: 30743 - DNA, 203 bp, synthetic construct; identical to SEQ ID NO: 6609
  source 1..203: mol_type = other DNA

SEQ ID NO: 30744 - DNA, 203 bp, synthetic construct; identical to SEQ ID NO: 6610
  source 1..203: mol_type = other DNA

SEQ ID NO: 30745 - DNA, 203 bp, synthetic construct; identical to SEQ ID NO: 6611
  source 1..203: mol_type = other DNA

SEQ ID NO: 30746 - DNA, 203 bp, synthetic construct; identical to SEQ ID NO: 6612
  source 1..203: mol_type = other DNA

SEQ ID NO: 30747 - DNA, 203 bp, synthetic construct; identical to SEQ ID NO: 6613
  source 1..203: mol_type = other DNA

SEQ ID NO: 30748 - DNA, 203 bp, synthetic construct; identical to SEQ ID NO: 6614
  source 1..203: mol_type = other DNA

SEQ ID NO: 30749 - DNA, 203 bp, synthetic construct; identical to SEQ ID NO: 6617
  source 1..203: mol_type = other DNA

SEQ ID NO: 30750 - DNA, 203 bp, synthetic construct; identical to SEQ ID NO: 6618
  source 1..203: mol_type = other DNA

SEQ ID NO: 30751 - DNA, 203 bp, synthetic construct; identical to SEQ ID NO: 6620
  source 1..203: mol_type = other DNA

SEQ ID NO: 30752 - DNA, 203 bp, synthetic construct; identical to SEQ ID NO: 6621
  source 1..203: mol_type = other DNA

SEQ ID NO: 30753 - DNA, 203 bp, synthetic construct; identical to SEQ ID NO: 6622
  source 1..203: mol_type = other DNA

SEQ ID NO: 30754 - DNA, 203 bp, synthetic construct; identical to SEQ ID NO: 6639
  source 1..203: mol_type = other DNA

SEQ ID NO: 30755 - DNA, 203 bp, synthetic construct; identical to SEQ ID NO: 6642
  source 1..203: mol_type = other DNA

SEQ ID NO: 30756 - DNA, 203 bp, synthetic construct; identical to SEQ ID NO: 6645
  source 1..203: mol_type = other DNA

SEQ ID NO: 30757 - DNA, 203 bp, synthetic construct; identical to SEQ ID NO: 6662
  source 1..203: mol_type = other DNA

SEQ ID NO: 30758 - DNA, 203 bp, synthetic construct; identical to SEQ ID NO: 6671
  source 1..203: mol_type = other DNA

SEQ ID NO: 30759 - DNA, 203 bp, synthetic construct; identical to SEQ ID NO: 6672
  source 1..203: mol_type = other DNA

SEQ ID NO: 30760 - DNA, 203 bp, synthetic construct; identical to SEQ ID NO: 6673
  source 1..203: mol_type = other DNA

SEQ ID NO: 30761 - DNA, 203 bp, synthetic construct; identical to SEQ ID NO: 6674
  source 1..203: mol_type = other DNA

SEQ ID NO: 30762 - DNA, 203 bp, synthetic construct; identical to SEQ ID NO: 6675
  source 1..203: mol_type = other DNA

SEQ ID NO: 30763 - DNA, 203 bp, synthetic construct; identical to SEQ ID NO: 6687
  source 1..203: mol_type = other DNA

SEQ ID NO: 30764 - DNA, 203 bp, synthetic construct; identical to SEQ ID NO: 6689
  source 1..203: mol_type = other DNA

SEQ ID NO: 30765 - DNA, 203 bp, synthetic construct; identical to SEQ ID NO: 6690
  source 1..203: mol_type = other DNA

SEQ ID NO: 30766 - DNA, 203 bp, synthetic construct; identical to SEQ ID NO: 6691
  source 1..203: mol_type = other DNA

SEQ ID NO: 30767 - DNA, 203 bp, synthetic construct; identical to SEQ ID NO: 6692
  source 1..203: mol_type = other DNA

SEQ ID NO: 30768 - DNA, 203 bp, synthetic construct; identical to SEQ ID NO: 6693
  source 1..203: mol_type = other DNA

SEQ ID NO: 30769 - DNA, 203 bp, synthetic construct; identical to SEQ ID NO: 6694
  source 1..203: mol_type = other DNA

SEQ ID NO: 30770 - DNA, 203 bp, synthetic construct; identical to SEQ ID NO: 6695
  source 1..203: mol_type = other DNA

SEQ ID NO: 30771 - DNA, 203 bp, synthetic construct; identical to SEQ ID NO: 6696
  source 1..203: mol_type = other DNA

SEQ ID NO: 30772 - DNA, 203 bp, synthetic construct; identical to SEQ ID NO: 6697
  source 1..203: mol_type = other DNA

SEQ ID NO: 30773 - DNA, 203 bp, synthetic construct; identical to SEQ ID NO: 6698
  source 1..203: mol_type = other DNA

SEQ ID NO: 30774 - DNA, 203 bp, synthetic construct; identical to SEQ ID NO: 6699
  source 1..203: mol_type = other DNA

SEQ ID NO: 30775 - DNA, 203 bp, synthetic construct; identical to SEQ ID NO: 6700
  source 1..203: mol_type = other DNA

SEQ ID NO: 30776 - DNA, 203 bp, synthetic construct; identical to SEQ ID NO: 6701
  source 1..203: mol_type = other DNA

SEQ ID NO: 30777 - DNA, 203 bp, synthetic construct; identical to SEQ ID NO: 6702
  source 1..203: mol_type = other DNA

SEQ ID NO: 30778 - DNA, 203 bp, synthetic construct; identical to SEQ ID NO: 6703
  source 1..203: mol_type = other DNA

SEQ ID NO: 30779 - DNA, 203 bp, synthetic construct; identical to SEQ ID NO: 6704
  source 1..203: mol_type = other DNA

SEQ ID NO: 30780 - DNA, 203 bp, synthetic construct; identical to SEQ ID NO: 6705
  source 1..203: mol_type = other DNA

SEQ ID NO: 30781 - DNA, 203 bp, synthetic construct; identical to SEQ ID NO: 6706
  source 1..203: mol_type = other DNA

SEQ ID NO: 30782 - DNA, 203 bp, synthetic construct; identical to SEQ ID NO: 6707
  source 1..203: mol_type = other DNA

SEQ ID NO: 30783 - DNA, 203 bp, synthetic construct; identical to SEQ ID NO: 6708
  source 1..203: mol_type = other DNA

SEQ ID NO: 30784 - DNA, 203 bp, synthetic construct; identical to SEQ ID NO: 6709
  source 1..203: mol_type = other DNA

SEQ ID NO: 30785 - DNA, 203 bp, synthetic construct; identical to SEQ ID NO: 6710
  source 1..203: mol_type = other DNA

SEQ ID NO: 30786 - DNA, 203 bp, synthetic construct; identical to SEQ ID NO: 6711
  source 1..203: mol_type = other DNA

SEQ ID NO: 30787 - DNA, 203 bp, synthetic construct; identical to SEQ ID NO: 6712
  source 1..203: mol_type = other DNA

SEQ ID NO: 30788 - DNA, 203 bp, synthetic construct; identical to SEQ ID NO: 6713
  source 1..203: mol_type = other DNA

SEQ ID NO: 30789 - DNA, 203 bp, synthetic construct; identical to SEQ ID NO: 6714
  source 1..203: mol_type = other DNA

SEQ ID NO: 30790 - DNA, 203 bp, synthetic construct; identical to SEQ ID NO: 6715
  source 1..203: mol_type = other DNA

SEQ ID NO: 30791 - DNA, 203 bp, synthetic construct; identical to SEQ ID NO: 6716
  source 1..203: mol_type = other DNA

SEQ ID NO: 30792 - DNA, 203 bp, synthetic construct; identical to SEQ ID NO: 6717
  source 1..203: mol_type = other DNA

SEQ ID NO: 30793 - DNA, 203 bp, synthetic construct; identical to SEQ ID NO: 6718
  source 1..203: mol_type = other DNA

SEQ ID NO: 30794 - DNA, 203 bp, synthetic construct; identical to SEQ ID NO: 6719
  source 1..203: mol_type = other DNA

SEQ ID NO: 30795 - DNA, 203 bp, synthetic construct; identical to SEQ ID NO: 6728
  source 1..203: mol_type = other DNA

SEQ ID NO: 30796 - DNA, 203 bp, synthetic construct; identical to SEQ ID NO: 6729
  source 1..203: mol_type = other DNA

SEQ ID NO: 30797 - DNA, 203 bp, synthetic construct; identical to SEQ ID NO: 6730
  source 1..203: mol_type = other DNA

SEQ ID NO: 30798 - DNA, 203 bp, synthetic construct; identical to SEQ ID NO: 6731
  source 1..203: mol_type = other DNA

SEQ ID NO: 30799 - DNA, 203 bp, synthetic construct; identical to SEQ ID NO: 6732
  source 1..203: mol_type = other DNA

SEQ ID NO: 30800 - DNA, 203 bp, synthetic construct; identical to SEQ ID NO: 6738
  source 1..203: mol_type = other DNA

SEQ ID NO: 30801 - DNA, 203 bp, synthetic construct; identical to SEQ ID NO: 6740
  source 1..203: mol_type = other DNA

SEQ ID NO: 30802 - DNA, 203 bp, synthetic construct; identical to SEQ ID NO: 6746
  source 1..203: mol_type = other DNA

SEQ ID NO: 30803 - DNA, 203 bp, synthetic construct; identical to SEQ ID NO: 6747
  source 1..203: mol_type = other DNA

SEQ ID NO: 30804 - DNA, 203 bp, synthetic construct; identical to SEQ ID NO: 6773
  source 1..203: mol_type = other DNA

SEQ ID NO: 30805 - DNA, 203 bp, synthetic construct; identical to SEQ ID NO: 6774
  source 1..203: mol_type = other DNA

SEQ ID NO: 30806 - DNA, 203 bp, synthetic construct; identical to SEQ ID NO: 6775
  source 1..203: mol_type = other DNA

SEQ ID NO: 30807 - DNA, 203 bp, synthetic construct; identical to SEQ ID NO: 6776
  source 1..203: mol_type = other DNA

SEQ ID NO: 30808 - DNA, 203 bp, synthetic construct; identical to SEQ ID NO: 6777
  source 1..203: mol_type = other DNA

SEQ ID NO: 30809 - DNA, 203 bp, synthetic construct; identical to SEQ ID NO: 6778
  source 1..203: mol_type = other DNA

SEQ ID NO: 30810 - DNA, 203 bp, synthetic construct; identical to SEQ ID NO: 6779
  source 1..203: mol_type = other DNA

SEQ ID NO: 30811 - DNA, 203 bp, synthetic construct; identical to SEQ ID NO: 6780
  source 1..203: mol_type = other DNA

SEQ ID NO: 30812 - DNA, 203 bp, synthetic construct; identical to SEQ ID NO: 6781
  source 1..203: mol_type = other DNA

SEQ ID NO: 30813 - DNA, 203 bp, synthetic construct; identical to SEQ ID NO: 6782
  source 1..203: mol_type = other DNA

SEQ ID NO: 30814 - DNA, 203 bp, synthetic construct; identical to SEQ ID NO: 6783
  source 1..203: mol_type = other DNA

SEQ ID NO: 30815 - DNA, 203 bp, synthetic construct; identical to SEQ ID NO: 6784
  source 1..203: mol_type = other DNA

SEQ ID NO: 30816 - DNA, 203 bp, synthetic construct; identical to SEQ ID NO: 6785
  source 1..203: mol_type = other DNA

SEQ ID NO: 30817 - DNA, 203 bp, synthetic construct; identical to SEQ ID NO: 6786
  source 1..203: mol_type = other DNA

SEQ ID NO: 30818 - DNA, 203 bp, synthetic construct; identical to SEQ ID NO: 6794
  source 1..203: mol_type = other DNA

SEQ ID NO: 30819 - DNA, 203 bp, synthetic construct; identical to SEQ ID NO: 6799
  source 1..203: mol_type = other DNA

SEQ ID NO: 30820 - DNA, 203 bp, synthetic construct; identical to SEQ ID NO: 6800
  source 1..203: mol_type = other DNA

SEQ ID NO: 30821 - DNA, 203 bp, synthetic construct; identical to SEQ ID NO: 6801
  source 1..203: mol_type = other DNA

SEQ ID NO: 30822 - DNA, 203 bp, synthetic construct; identical to SEQ ID NO: 6802
  source 1..203: mol_type = other DNA

SEQ ID NO: 30823 - DNA, 203 bp, synthetic construct; identical to SEQ ID NO: 6803
  source 1..203: mol_type = other DNA

SEQ ID NO: 30824 - DNA, 203 bp, synthetic construct; identical to SEQ ID NO: 6809
  source 1..203: mol_type = other DNA

SEQ ID NO: 30825 - DNA, 203 bp, synthetic construct; identical to SEQ ID NO: 6810
  source 1..203: mol_type = other DNA

SEQ ID NO: 30826 - DNA, 203 bp, synthetic construct; identical to SEQ ID NO: 6823
  source 1..203: mol_type = other DNA

SEQ ID NO: 30827 - DNA, 203 bp, synthetic construct; identical to SEQ ID NO: 6827
  source 1..203: mol_type = other DNA

SEQ ID NO: 30828 - DNA, 203 bp, synthetic construct; identical to SEQ ID NO: 6839
  source 1..203: mol_type = other DNA

SEQ ID NO: 30829 - DNA, 203 bp, synthetic construct; identical to SEQ ID NO: 6841
  source 1..203: mol_type = other DNA

SEQ ID NO: 30830 - DNA, 203 bp, synthetic construct; identical to SEQ ID NO: 6842
  source 1..203: mol_type = other DNA

SEQ ID NO: 30831 - DNA, 203 bp, synthetic construct; identical to SEQ ID NO: 6843
  source 1..203: mol_type = other DNA

SEQ ID NO: 30832 - DNA, 203 bp, synthetic construct; identical to SEQ ID NO: 6844
  source 1..203: mol_type = other DNA

SEQ ID NO: 30833 - DNA, 203 bp, synthetic construct; identical to SEQ ID NO: 6845
  source 1..203: mol_type = other DNA

SEQ ID NO: 30834 - DNA, 203 bp, synthetic construct; identical to SEQ ID NO: 6846
  source 1..203: mol_type = other DNA

SEQ ID NO: 30835 - DNA, 203 bp, synthetic construct; identical to SEQ ID NO: 6847
  source 1..203: mol_type = other DNA

SEQ ID NO: 30836 - DNA, 203 bp, synthetic construct; identical to SEQ ID NO: 6848
  source 1..203: mol_type = other DNA

SEQ ID NO: 30837 - DNA, 203 bp, synthetic construct; identical to SEQ ID NO: 6849
  source 1..203: mol_type = other DNA

SEQ ID NO: 30838 - DNA, 203 bp, synthetic construct; identical to SEQ ID NO: 6850
  source 1..203: mol_type = other DNA

SEQ ID NO: 30839 - DNA, 203 bp, synthetic construct; identical to SEQ ID NO: 6851
  source 1..203: mol_type = other DNA

SEQ ID NO: 30840 - DNA, 203 bp, synthetic construct; identical to SEQ ID NO: 6852
  source 1..203: mol_type = other DNA

SEQ ID NO: 30841 - DNA, 203 bp, synthetic construct; identical to SEQ ID NO: 6853
  source 1..203: mol_type = other DNA

SEQ ID NO: 30842 - DNA, 203 bp, synthetic construct; identical to SEQ ID NO: 6854
  source 1..203: mol_type = other DNA

SEQ ID NO: 30843 - DNA, 203 bp, synthetic construct; identical to SEQ ID NO: 6855
  source 1..203: mol_type = other DNA

SEQ ID NO: 30844 - DNA, 203 bp, synthetic construct; identical to SEQ ID NO: 6856
  source 1..203: mol_type = other DNA

SEQ ID NO: 30845 - DNA, 203 bp, synthetic construct; identical to SEQ ID NO: 6857
  source 1..203: mol_type = other DNA

SEQ ID NO: 30846 - DNA, 203 bp, synthetic construct; identical to SEQ ID NO: 6858
  source 1..203: mol_type = other DNA

SEQ ID NO: 30847 - DNA, 203 bp, synthetic construct; identical to SEQ ID NO: 6863
  source 1..203: mol_type = other DNA

SEQ ID NO: 30848 - DNA, 203 bp, synthetic construct; identical to SEQ ID NO: 6864
  source 1..203: mol_type = other DNA

SEQ ID NO: 30849 - DNA, 203 bp, synthetic construct; identical to SEQ ID NO: 6865
  source 1..203: mol_type = other DNA

SEQ ID NO: 30850 - DNA, 203 bp, synthetic construct; identical to SEQ ID NO: 6866
  source 1..203: mol_type = other DNA

SEQ ID NO: 30851 - DNA, 203 bp, synthetic construct; identical to SEQ ID NO: 6867
  source 1..203: mol_type = other DNA

SEQ ID NO: 30852 - DNA, 203 bp, synthetic construct; identical to SEQ ID NO: 6868
  source 1..203: mol_type = other DNA

SEQ ID NO: 30853 - DNA, 203 bp, synthetic construct; identical to SEQ ID NO: 6869
  source 1..203: mol_type = other DNA

SEQ ID NO: 30854 - DNA, 203 bp, synthetic construct; identical to SEQ ID NO: 6870
  source 1..203: mol_type = other DNA

SEQ ID NO: 30855 - DNA, 203 bp, synthetic construct; identical to SEQ ID NO: 6871
  source 1..203: mol_type = other DNA

SEQ ID NO: 30856 - DNA, 203 bp, synthetic construct; identical to SEQ ID NO: 6872
  source 1..203: mol_type = other DNA

SEQ ID NO: 30857 - DNA, 203 bp, synthetic construct; identical to SEQ ID NO: 6873
  source 1..203: mol_type = other DNA

SEQ ID NO: 30858 - DNA, 203 bp, synthetic construct; identical to SEQ ID NO: 6874
  source 1..203: mol_type = other DNA

SEQ ID NO: 30859 - DNA, 203 bp, synthetic construct; identical to SEQ ID NO: 6875
  source 1..203: mol_type = other DNA

SEQ ID NO: 30860 - DNA, 203 bp, synthetic construct; identical to SEQ ID NO: 6876
  source 1..203: mol_type = other DNA

SEQ ID NO: 30861 - DNA, 203 bp, synthetic construct; identical to SEQ ID NO: 6877
  source 1..203: mol_type = other DNA

SEQ ID NO: 30862 - DNA, 203 bp, synthetic construct; identical to SEQ ID NO: 6878
  source 1..203: mol_type = other DNA

SEQ ID NO: 30863 - DNA, 203 bp, synthetic construct; identical to SEQ ID NO: 6879
  source 1..203: mol_type = other DNA

SEQ ID NO: 30864 - DNA, 203 bp, synthetic construct; identical to SEQ ID NO: 6880
  source 1..203: mol_type = other DNA

SEQ ID NO: 30865 - DNA, 203 bp, synthetic construct; identical to SEQ ID NO: 6881
  source 1..203: mol_type = other DNA

SEQ ID NO: 30866 - DNA, 203 bp, synthetic construct; identical to SEQ ID NO: 6882
  source 1..203: mol_type = other DNA

SEQ ID NO: 30867 - DNA, 203 bp, synthetic construct; identical to SEQ ID NO: 6884
  source 1..203: mol_type = other DNA

SEQ ID NO: 30868 - DNA, 203 bp, synthetic construct; identical to SEQ ID NO: 6885
  source 1..203: mol_type = other DNA

SEQ ID NO: 30869 - DNA, 203 bp, synthetic construct; identical to SEQ ID NO: 6886
  source 1..203: mol_type = other DNA

SEQ ID NO: 30870 - DNA, 203 bp, synthetic construct; identical to SEQ ID NO: 6887
  source 1..203: mol_type = other DNA

SEQ ID NO: 30871 - DNA, 203 bp, synthetic construct; identical to SEQ ID NO: 6888
  source 1..203: mol_type = other DNA

SEQ ID NO: 30872 - DNA, 203 bp, synthetic construct; identical to SEQ ID NO: 6889
  source 1..203: mol_type = other DNA

SEQ ID NO: 30873 - DNA, 203 bp, synthetic construct; identical to SEQ ID NO: 6890
  source 1..203: mol_type = other DNA

SEQ ID NO: 30874 - DNA, 203 bp, synthetic construct; identical to SEQ ID NO: 6891
  source 1..203: mol_type = other DNA

SEQ ID NO: 30875 - DNA, 203 bp, synthetic construct; identical to SEQ ID NO: 6892
  source 1..203: mol_type = other DNA

SEQ ID NO: 30876 - DNA, 203 bp, synthetic construct; identical to SEQ ID NO: 6893
  source 1..203: mol_type = other DNA

SEQ ID NO: 30877 - DNA, 203 bp, synthetic construct; identical to SEQ ID NO: 6894
  source 1..203: mol_type = other DNA

SEQ ID NO: 30878 - DNA, 203 bp, synthetic construct; identical to SEQ ID NO: 6895
  source 1..203: mol_type = other DNA

SEQ ID NO: 30879 - DNA, 203 bp, synthetic construct; identical to SEQ ID NO: 6896
  source 1..203: mol_type = other DNA

SEQ ID NO: 30880 - DNA, 203 bp, synthetic construct; identical to SEQ ID NO: 6897
  source 1..203: mol_type = other DNA

SEQ ID NO: 30881 - DNA, 203 bp, synthetic construct; identical to SEQ ID NO: 6898
  source 1..203: mol_type = other DNA

SEQ ID NO: 30882 - DNA, 203 bp, synthetic construct; identical to SEQ ID NO: 6899
  source 1..203: mol_type = other DNA

SEQ ID NO: 30883 - DNA, 203 bp, synthetic construct; identical to SEQ ID NO: 6900
  source 1..203: mol_type = other DNA

SEQ ID NO: 30884 - DNA, 203 bp, synthetic construct; identical to SEQ ID NO: 6901
  source 1..203: mol_type = other DNA

SEQ ID NO: 30885 - DNA, 203 bp, synthetic construct; identical to SEQ ID NO: 6902
  source 1..203: mol_type = other DNA

SEQ ID NO: 30886 - DNA, 203 bp, synthetic construct; identical to SEQ ID NO: 6903
  source 1..203: mol_type = other DNA

SEQ ID NO: 30887 - DNA, 203 bp, synthetic construct; identical to SEQ ID NO: 6904
  source 1..203: mol_type = other DNA

SEQ ID NO: 30888 - DNA, 203 bp, synthetic construct; identical to SEQ ID NO: 6905
  source 1..203: mol_type = other DNA

SEQ ID NO: 30889 - DNA, 203 bp, synthetic construct; identical to SEQ ID NO: 6906
  source 1..203: mol_type = other DNA

SEQ ID NO: 30890 - DNA, 203 bp, synthetic construct; identical to SEQ ID NO: 6907
  source 1..203: mol_type = other DNA

SEQ ID NO: 30891 - DNA, 203 bp, synthetic construct; identical to SEQ ID NO: 6908
  source 1..203: mol_type = other DNA

SEQ ID NO: 30892 - DNA, 203 bp, synthetic construct; identical to SEQ ID NO: 6909
  source 1..203: mol_type = other DNA

SEQ ID NO: 30893 - DNA, 203 bp, synthetic construct; identical to SEQ ID NO: 6913
  source 1..203: mol_type = other DNA

SEQ ID NO: 30894 - DNA, 203 bp, synthetic construct; identical to SEQ ID NO: 6914
  source 1..203: mol_type = other DNA

SEQ ID NO: 30895 - DNA, 203 bp, synthetic construct; identical to SEQ ID NO: 6915
  source 1..203: mol_type = other DNA

SEQ ID NO: 30896 - DNA, 203 bp, synthetic construct; identical to SEQ ID NO: 6916
  source 1..203: mol_type = other DNA

SEQ ID NO: 30897 - DNA, 203 bp, synthetic construct; identical to SEQ ID NO: 6917
  source 1..203: mol_type = other DNA

SEQ ID NO: 30898 - DNA, 203 bp, synthetic construct; identical to SEQ ID NO: 6918
  source 1..203: mol_type = other DNA

SEQ ID NO: 30899 - DNA, 203 bp, synthetic construct; identical to SEQ ID NO: 6919
  source 1..203: mol_type = other DNA

SEQ ID NO: 30900 - DNA, 203 bp, synthetic construct; identical to SEQ ID NO: 6920
  source 1..203: mol_type = other DNA

SEQ ID NO: 30901 - DNA, 203 bp, synthetic construct; identical to SEQ ID NO: 6921
  source 1..203: mol_type = other DNA

SEQ ID NO: 30902 - DNA, 203 bp, synthetic construct; identical to SEQ ID NO: 6922
  source 1..203: mol_type = other DNA

SEQ ID NO: 30903 - DNA, 203 bp, synthetic construct; identical to SEQ ID NO: 6923
  source 1..203: mol_type = other DNA

SEQ ID NO: 30904 - DNA, 203 bp, synthetic construct; identical to SEQ ID NO: 6924
  source 1..203: mol_type = other DNA

SEQ ID NO: 30905 - DNA, 203 bp, synthetic construct; identical to SEQ ID NO: 6925
  source 1..203: mol_type = other DNA

SEQ ID NO: 30906 - DNA, 203 bp, synthetic construct; identical to SEQ ID NO: 6926
  source 1..203: mol_type = other DNA

SEQ ID NO: 30907 - DNA, 203 bp, synthetic construct; identical to SEQ ID NO: 6927
  source 1..203: mol_type = other DNA

SEQ ID NO: 30908 - DNA, 203 bp, synthetic construct; identical to SEQ ID NO: 6943
  source 1..203: mol_type = other DNA

SEQ ID NO: 30909 - DNA, 203 bp, synthetic construct; identical to SEQ ID NO: 6944
  source 1..203: mol_type = other DNA

SEQ ID NO: 30910 - DNA, 203 bp, synthetic construct; identical to SEQ ID NO: 6945
  source 1..203: mol_type = other DNA

SEQ ID NO: 30911 - DNA, 203 bp, synthetic construct; identical to SEQ ID NO: 6946
  source 1..203: mol_type = other DNA

SEQ ID NO: 30912 - DNA, 203 bp, synthetic construct; identical to SEQ ID NO: 6947
  source 1..203: mol_type = other DNA

SEQ ID NO: 30913 - DNA, 203 bp, synthetic construct; identical to SEQ ID NO: 6948
  source 1..203: mol_type = other DNA

SEQ ID NO: 30914 - DNA, 203 bp, synthetic construct; identical to SEQ ID NO: 6949
  source 1..203: mol_type = other DNA

SEQ ID NO: 30915 - DNA, 203 bp, synthetic construct; identical to SEQ ID NO: 6950
  source 1..203: mol_type = other DNA

SEQ ID NO: 30916 - DNA, 203 bp, synthetic construct; identical to SEQ ID NO: 6976
  source 1..203: mol_type = other DNA

SEQ ID NO: 30917 - DNA, 203 bp, synthetic construct; identical to SEQ ID NO: 6977
  source 1..203: mol_type = other DNA

SEQ ID NO: 30918 - DNA, 203 bp, synthetic construct; identical to SEQ ID NO: 6978
  source 1..203: mol_type = other DNA

SEQ ID NO: 30919 - DNA, 203 bp, synthetic construct; identical to SEQ ID NO: 6979
  source 1..203: mol_type = other DNA

SEQ ID NO: 30920 - DNA, 203 bp, synthetic construct; identical to SEQ ID NO: 6980
  source 1..203: mol_type = other DNA

SEQ ID NO: 30921 - DNA, 203 bp, synthetic construct; identical to SEQ ID NO: 6981
  source 1..203: mol_type = other DNA

SEQ ID NO: 30922 - DNA, 203 bp, synthetic construct; identical to SEQ ID NO: 6982
  source 1..203: mol_type = other DNA

SEQ ID NO: 30923 - DNA, 203 bp, synthetic construct; identical to SEQ ID NO: 6983
  source 1..203: mol_type = other DNA

SEQ ID NO: 30924 - DNA, 203 bp, synthetic construct; identical to SEQ ID NO: 6984
  source 1..203: mol_type = other DNA

SEQ ID NO: 30925 - DNA, 203 bp, synthetic construct; identical to SEQ ID NO: 6985
  source 1..203: mol_type = other DNA

SEQ ID NO: 30926 - DNA, 203 bp, synthetic construct; identical to SEQ ID NO: 6986
  source 1..203: mol_type = other DNA

SEQ ID NO: 30927 - DNA, 203 bp, synthetic construct; identical to SEQ ID NO: 6987
  source 1..203: mol_type = other DNA

SEQ ID NO: 30928 - DNA, 203 bp, synthetic construct; identical to SEQ ID NO: 6999
  source 1..203: mol_type = other DNA

SEQ ID NO: 30929 - DNA, 203 bp, synthetic construct; identical to SEQ ID NO: 7000
  source 1..203: mol_type = other DNA

SEQ ID NO: 30930 - DNA, 203 bp, synthetic construct; identical to SEQ ID NO: 7001
  source 1..203: mol_type = other DNA

SEQ ID NO: 30931 - DNA, 203 bp, synthetic construct; identical to SEQ ID NO: 7002
  source 1..203: mol_type = other DNA

SEQ ID NO: 30932 - DNA, 203 bp, synthetic construct; identical to SEQ ID NO: 7003
  source 1..203: mol_type = other DNA

SEQ ID NO: 30933 - DNA, 203 bp, synthetic construct; identical to SEQ ID NO: 7004
  source 1..203: mol_type = other DNA

SEQ ID NO: 30934 - DNA, 203 bp, synthetic construct; identical to SEQ ID NO: 7005
  source 1..203: mol_type = other DNA

SEQ ID NO: 30935 - DNA, 203 bp, synthetic construct; identical to SEQ ID NO: 7006
  source 1..203: mol_type = other DNA

SEQ ID NO: 30936 - DNA, 203 bp, synthetic construct; identical to SEQ ID NO: 7007
  source 1..203: mol_type = other DNA

SEQ ID NO: 30937 - DNA, 203 bp, synthetic construct; identical to SEQ ID NO: 7008
  source 1..203: mol_type = other DNA

SEQ ID NO: 30938 - DNA, 203 bp, synthetic construct; identical to SEQ ID NO: 7012
  source 1..203: mol_type = other DNA

SEQ ID NO: 30939 - DNA, 203 bp, synthetic construct; identical to SEQ ID NO: 7056
  source 1..203: mol_type = other DNA

SEQ ID NO: 30940 - DNA, 203 bp, synthetic construct; identical to SEQ ID NO: 7074
  source 1..203: mol_type = other DNA

SEQ ID NO: 30941 - DNA, 203 bp, synthetic construct; identical to SEQ ID NO: 7075
  source 1..203: mol_type = other DNA

SEQ ID NO: 30942 - DNA, 203 bp, synthetic construct; identical to SEQ ID NO: 7076
  source 1..203: mol_type = other DNA

SEQ ID NO: 30943 - DNA, 203 bp, synthetic construct; identical to SEQ ID NO: 7077
  source 1..203: mol_type = other DNA

SEQ ID NO: 30944 - DNA, 203 bp, synthetic construct; identical to SEQ ID NO: 7078
  source 1..203: mol_type = other DNA

SEQ ID NO: 30945 - DNA, 203 bp, synthetic construct; identical to SEQ ID NO: 7079
  source 1..203: mol_type = other DNA

SEQ ID NO: 30946 - DNA, 203 bp, synthetic construct; identical to SEQ ID NO: 7080
  source 1..203: mol_type = other DNA

SEQ ID NO: 30947 - DNA, 203 bp, synthetic construct; identical to SEQ ID NO: 7081
  source 1..203: mol_type = other DNA

SEQ ID NO: 30948 - DNA, 203 bp, synthetic construct; identical to SEQ ID NO: 7082
  source 1..203: mol_type = other DNA

SEQ ID NO: 30949 - DNA, 203 bp, synthetic construct; identical to SEQ ID NO: 7083
  source 1..203: mol_type = other DNA

SEQ ID NO: 30950 - DNA, 203 bp, synthetic construct; identical to SEQ ID NO: 7084
  source 1..203: mol_type = other DNA

SEQ ID NO: 30951 - DNA, 203 bp, synthetic construct; identical to SEQ ID NO: 7085
  source 1..203: mol_type = other DNA

SEQ ID NO: 30952 - DNA, 203 bp, synthetic construct; identical to SEQ ID NO: 7086
  source 1..203: mol_type = other DNA

SEQ ID NO: 30953 - DNA, 203 bp, synthetic construct; identical to SEQ ID NO: 7087
  source 1..203: mol_type = other DNA

SEQ ID NO: 30954 - DNA, 203 bp, synthetic construct; identical to SEQ ID NO: 7088
  source 1..203: mol_type = other DNA

SEQ ID NO: 30955 - DNA, 203 bp, synthetic construct; identical to SEQ ID NO: 7089
  source 1..203: mol_type = other DNA

SEQ ID NO: 30956 - DNA, 203 bp, synthetic construct; identical to SEQ ID NO: 7090
  source 1..203: mol_type = other DNA

SEQ ID NO: 30957 - DNA, 203 bp, synthetic construct; identical to SEQ ID NO: 7091
  source 1..203: mol_type = other DNA

SEQ ID NO: 30958 - DNA, 203 bp, synthetic construct; identical to SEQ ID NO: 7092
  source 1..203: mol_type = other DNA

SEQ ID NO: 30959 - DNA, 203 bp, synthetic construct; identical to SEQ ID NO: 7093
  source 1..203: mol_type = other DNA

SEQ ID NO: 30960 - DNA, 203 bp, synthetic construct; identical to SEQ ID NO: 7094
  source 1..203: mol_type = other DNA

SEQ ID NO: 30961 - DNA, 203 bp, synthetic construct; identical to SEQ ID NO: 7095
  source 1..203: mol_type = other DNA

SEQ ID NO: 30962 - DNA, 203 bp, synthetic construct; identical to SEQ ID NO: 7096
  source 1..203: mol_type = other DNA

SEQ ID NO: 30963 - DNA, 203 bp, synthetic construct; identical to SEQ ID NO: 7097
  source 1..203: mol_type = other DNA

SEQ ID NO: 30964 - DNA, 203 bp, synthetic construct; identical to SEQ ID NO: 7098
  source 1..203: mol_type = other DNA

SEQ ID NO: 30965 - DNA, 203 bp, synthetic construct; identical to SEQ ID NO: 7099
  source 1..203: mol_type = other DNA

SEQ ID NO: 30966 - DNA, 203 bp, synthetic construct; identical to SEQ ID NO: 7100
  source 1..203: mol_type = other DNA

SEQ ID NO: 30967 - DNA, 203 bp, synthetic construct; identical to SEQ ID NO: 7101
  source 1..203: mol_type = other DNA

SEQ ID NO: 30968 - DNA, 203 bp, synthetic construct; identical to SEQ ID NO: 7118
  source 1..203: mol_type = other DNA

SEQ ID NO: 30969 - DNA, 203 bp, synthetic construct; identical to SEQ ID NO: 7119
  source 1..203: mol_type = other DNA

SEQ ID NO: 30970 - DNA, 203 bp, synthetic construct; identical to SEQ ID NO: 7120
  source 1..203: mol_type = other DNA

SEQ ID NO: 30971 - DNA, 203 bp, synthetic construct; identical to SEQ ID NO: 7121
  source 1..203: mol_type = other DNA

SEQ ID NO: 30972 - DNA, 203 bp, synthetic construct; identical to SEQ ID NO: 7123
  source 1..203: mol_type = other DNA

SEQ ID NO: 30973 - DNA, 203 bp, synthetic construct; identical to SEQ ID NO: 7124
  source 1..203: mol_type = other DNA

SEQ ID NO: 30974 - DNA, 203 bp, synthetic construct; identical to SEQ ID NO: 7125
  source 1..203: mol_type = other DNA

SEQ ID NO: 30975 - DNA, 203 bp, synthetic construct; identical to SEQ ID NO: 7126
  source 1..203: mol_type = other DNA

SEQ ID NO: 30976 - DNA, 203 bp, synthetic construct; identical to SEQ ID NO: 7127
  source 1..203: mol_type = other DNA

SEQ ID NO: 30977 - DNA, 203 bp, synthetic construct; identical to SEQ ID NO: 7149
  source 1..203: mol_type = other DNA

SEQ ID NO: 30978 - DNA, 203 bp, synthetic construct; identical to SEQ ID NO: 7150
  source 1..203: mol_type = other DNA

SEQ ID NO: 30979 - DNA, 203 bp, synthetic construct; identical to SEQ ID NO: 7151
  source 1..203: mol_type = other DNA

SEQ ID NO: 30980 - DNA, 203 bp, synthetic construct; identical to SEQ ID NO: 7152
  source 1..203: mol_type = other DNA

SEQ ID NO: 30981 - DNA, 203 bp, synthetic construct; identical to SEQ ID NO: 7153
  source 1..203: mol_type = other DNA

SEQ ID NO: 30982 - DNA, 203 bp, synthetic construct; identical to SEQ ID NO: 7154
  source 1..203: mol_type = other DNA

SEQ ID NO: 30983 - DNA, 203 bp, synthetic construct; identical to SEQ ID NO: 7156
  source 1..203: mol_type = other DNA

SEQ ID NO: 30984 - DNA, 203 bp, synthetic construct; identical to SEQ ID NO: 7157
  source 1..203: mol_type = other DNA

SEQ ID NO: 30985 - DNA, 203 bp, synthetic construct; identical to SEQ ID NO: 7158
  source 1..203: mol_type = other DNA

SEQ ID NO: 30986 - DNA, 203 bp, synthetic construct; identical to SEQ ID NO: 7159
  source 1..203: mol_type = other DNA

SEQ ID NO: 30987 - DNA, 203 bp, synthetic construct; identical to SEQ ID NO: 7160
  source 1..203: mol_type = other DNA

SEQ ID NO: 30988 - DNA, 203 bp, synthetic construct; identical to SEQ ID NO: 7161
  source 1..203: mol_type = other DNA

SEQ ID NO: 30989 - DNA, 203 bp, synthetic construct; identical to SEQ ID NO: 7163
  source 1..203: mol_type = other DNA

SEQ ID NO: 30990 - DNA, 203 bp, synthetic construct; identical to SEQ ID NO: 7164
  source 1..203: mol_type = other DNA

SEQ ID NO: 30991 - DNA, 203 bp, synthetic construct; identical to SEQ ID NO: 7165
  source 1..203: mol_type = other DNA

SEQ ID NO: 30992 - DNA, 203 bp, synthetic construct; identical to SEQ ID NO: 7166
  source 1..203: mol_type = other DNA

SEQ ID NO: 30993 - DNA, 203 bp, synthetic construct; identical to SEQ ID NO: 7167
  source 1..203: mol_type = other DNA

SEQ ID NO: 30994 - DNA, 203 bp, synthetic construct; identical to SEQ ID NO: 7168
  source 1..203: mol_type = other DNA

SEQ ID NO: 30995 - DNA, 203 bp, synthetic construct; identical to SEQ ID NO: 7169
  source 1..203: mol_type = other DNA

SEQ ID NO: 30996 - DNA, 203 bp, synthetic construct; identical to SEQ ID NO: 7170
  source 1..203: mol_type = other DNA

SEQ ID NO: 30997 - DNA, 203 bp, synthetic construct; identical to SEQ ID NO: 7171
  source 1..203: mol_type = other DNA

SEQ ID NO: 30998 - DNA, 203 bp, synthetic construct; identical to SEQ ID NO: 7172
  source 1..203: mol_type = other DNA

SEQ ID NO: 30999 - DNA, 203 bp, synthetic construct; identical to SEQ ID NO: 7173
  source 1..203: mol_type = other DNA

SEQ ID NO: 31000 - DNA, 203 bp, synthetic construct; identical to SEQ ID NO: 7174
  source 1..203: mol_type = other DNA

SEQ ID NO: 31001 - DNA, 203 bp, synthetic construct; identical to SEQ ID NO: 7175
  source 1..203: mol_type = other DNA

SEQ ID NO: 31002 - DNA, 203 bp, synthetic construct; identical to SEQ ID NO: 7176
  source 1..203: mol_type = other DNA

SEQ ID NO: 31003 - DNA, 203 bp, synthetic construct; identical to SEQ ID NO: 7177
  source 1..203: mol_type = other DNA

SEQ ID NO: 31004 - DNA, 203 bp, synthetic construct; identical to SEQ ID NO: 7178
  source 1..203: mol_type = other DNA

SEQ ID NO: 31005 - DNA, 203 bp, synthetic construct; identical to SEQ ID NO: 7179
  source 1..203: mol_type = other DNA

SEQ ID NO: 31006 - DNA, 203 bp, synthetic construct; identical to SEQ ID NO: 7180
  source 1..203: mol_type = other DNA

SEQ ID NO: 31007 - DNA, 203 bp, synthetic construct; identical to SEQ ID NO: 7181
  source 1..203: mol_type = other DNA

SEQ ID NO: 31008 - DNA, 203 bp, synthetic construct; identical to SEQ ID NO: 7182
  source 1..203: mol_type = other DNA

SEQ ID NO: 31009 - DNA, 203 bp, synthetic construct; identical to SEQ ID NO: 7183
  source 1..203: mol_type = other DNA

SEQ ID NO: 31010 - DNA, 203 bp, synthetic construct; identical to SEQ ID NO: 7184
  source 1..203: mol_type = other DNA

SEQ ID NO: 31011 - DNA, 203 bp, synthetic construct; identical to SEQ ID NO: 7185
  source 1..203: mol_type = other DNA

SEQ ID NO: 31012 - DNA, 203 bp, synthetic construct; identical to SEQ ID NO: 7186
  source 1..203: mol_type = other DNA

SEQ ID NO: 31013 - DNA, 203 bp, synthetic construct; identical to SEQ ID NO: 7187
  source 1..203: mol_type = other DNA

SEQ ID NO: 31014 - DNA, 203 bp, synthetic construct; identical to SEQ ID NO: 7188
  source 1..203: mol_type = other DNA

SEQ ID NO: 31015 - DNA, 203 bp, synthetic construct; identical to SEQ ID NO: 7189
  source 1..203: mol_type = other DNA

SEQ ID NO: 31016 - DNA, 203 bp, synthetic construct; identical to SEQ ID NO: 7190
  source 1..203: mol_type = other DNA

SEQ ID NO: 31017 - DNA, 203 bp, synthetic construct; identical to SEQ ID NO: 7192
  source 1..203: mol_type = other DNA

SEQ ID NO: 31018 - DNA, 203 bp, synthetic construct; identical to SEQ ID NO: 7199
  source 1..203: mol_type = other DNA

SEQ ID NO: 31019 - DNA, 203 bp, synthetic construct; identical to SEQ ID NO: 7208
  source 1..203: mol_type = other DNA

SEQ ID NO: 31020 - DNA, 203 bp, synthetic construct; identical to SEQ ID NO: 7213
  source 1..203: mol_type = other DNA

SEQ ID NO: 31021 - DNA, 203 bp, synthetic construct; identical to SEQ ID NO: 7214
  source 1..203: mol_type = other DNA

SEQ ID NO: 31022 - DNA, 203 bp, synthetic construct; identical to SEQ ID NO: 7215
  source 1..203: mol_type = other DNA

SEQ ID NO: 31023 - DNA, 203 bp, synthetic construct; identical to SEQ ID NO: 7216
  source 1..203: mol_type = other DNA

SEQ ID NO: 31024 - DNA, 203 bp, synthetic construct; identical to SEQ ID NO: 7217
  source 1..203: mol_type = other DNA

SEQ ID NO: 31025 - DNA, 203 bp, synthetic construct; identical to SEQ ID NO: 7219
  source 1..203: mol_type = other DNA

SEQ ID NO: 31026 - DNA, 203 bp, synthetic construct; identical to SEQ ID NO: 7220
  source 1..203: mol_type = other DNA

SEQ ID NO: 31027 - DNA, 203 bp, synthetic construct; identical to SEQ ID NO: 7221
  source 1..203: mol_type = other DNA

SEQ ID NO: 31028 - DNA, 203 bp, synthetic construct; identical to SEQ ID NO: 7222
  source 1..203: mol_type = other DNA

SEQ ID NO: 31029 - DNA, 203 bp, synthetic construct; identical to SEQ ID NO: 7223
  source 1..203: mol_type = other DNA

SEQ ID NO: 31030 - DNA, 203 bp, synthetic construct; identical to SEQ ID NO: 7224
  source 1..203: mol_type = other DNA

SEQ ID NO: 31031 - DNA, 203 bp, synthetic construct; identical to SEQ ID NO: 7225
  source 1..203: mol_type = other DNA

SEQ ID NO: 31032 - DNA, 203 bp, synthetic construct; identical to SEQ ID NO: 7226
  source 1..203: mol_type = other DNA

SEQ ID NO: 31033 - DNA, 203 bp, synthetic construct; identical to SEQ ID NO: 7229
  source 1..203: mol_type = other DNA

SEQ ID NO: 31034 - DNA, 203 bp, synthetic construct; identical to SEQ ID NO: 7230
  source 1..203: mol_type = other DNA

SEQ ID NO: 31035 - DNA, 203 bp, synthetic construct; identical to SEQ ID NO: 7238
  source 1..203: mol_type = other DNA

SEQ ID NO: 31036 - DNA, 203 bp, synthetic construct; identical to SEQ ID NO: 7239
  source 1..203: mol_type = other DNA

SEQ ID NO: 31037 - DNA, 203 bp, synthetic construct; identical to SEQ ID NO: 7240
  source 1..203: mol_type = other DNA

SEQ ID NO: 31038 - DNA, 203 bp, synthetic construct; identical to SEQ ID NO: 7241
  source 1..203: mol_type = other DNA

SEQ ID NO: 31039 - DNA, 203 bp, synthetic construct; identical to SEQ ID NO: 7242
  source 1..203: mol_type = other DNA

SEQ ID NO: 31040 - DNA, 203 bp, synthetic construct; identical to SEQ ID NO: 7243
  source 1..203: mol_type = other DNA

SEQ ID NO: 31041 - DNA, 203 bp, synthetic construct; identical to SEQ ID NO: 7244
  source 1..203: mol_type = other DNA

SEQ ID NO: 31042 - DNA, 203 bp, synthetic construct; identical to SEQ ID NO: 7245
  source 1..203: mol_type = other DNA

SEQ ID NO: 31043 - DNA, 203 bp, synthetic construct; identical to SEQ ID NO: 7250
  source 1..203: mol_type = other DNA

SEQ ID NO: 31044 - DNA, 203 bp, synthetic construct; identical to SEQ ID NO: 7251
  source 1..203: mol_type = other DNA

SEQ ID NO: 31045 - DNA, 203 bp, synthetic construct; identical to SEQ ID NO: 7252
  source 1..203: mol_type = other DNA

SEQ ID NO: 31046 - DNA, 203 bp, synthetic construct; identical to SEQ ID NO: 7253
  source 1..203: mol_type = other DNA

SEQ ID NO: 31047 - DNA, 203 bp, synthetic construct; identical to SEQ ID NO: 7254
  source 1..203: mol_type = other DNA

SEQ ID NO: 31048 - DNA, 203 bp, synthetic construct; identical to SEQ ID NO: 7255
  source 1..203: mol_type = other DNA

SEQ ID NO: 31049 - DNA, 203 bp, synthetic construct; identical to SEQ ID NO: 7256
  source 1..203: mol_type = other DNA

SEQ ID NO: 31050 - DNA, 203 bp, synthetic construct; identical to SEQ ID NO: 7257
  source 1..203: mol_type = other DNA

SEQ ID NO: 31051 - DNA, 203 bp, synthetic construct; identical to SEQ ID NO: 7258
  source 1..203: mol_type = other DNA

SEQ ID NO: 31052 - DNA, 203 bp, synthetic construct; identical to SEQ ID NO: 7259
  source 1..203: mol_type = other DNA

SEQ ID NO: 31053 - DNA, 203 bp, synthetic construct; identical to SEQ ID NO: 7263
  source 1..203: mol_type = other DNA

SEQ ID NO: 31054 - DNA, 203 bp, synthetic construct; identical to SEQ ID NO: 7279
  source 1..203: mol_type = other DNA

SEQ ID NO: 31055 - DNA, 203 bp, synthetic construct; identical to SEQ ID NO: 7281
  source 1..203: mol_type = other DNA

SEQ ID NO: 31056 - DNA, 203 bp, synthetic construct; identical to SEQ ID NO: 7329
  source 1..203: mol_type = other DNA

SEQ ID NO: 31057 - DNA, 203 bp, synthetic construct; identical to SEQ ID NO: 7333
  source 1..203: mol_type = other DNA

SEQ ID NO: 31058 - DNA, 203 bp, synthetic construct; identical to SEQ ID NO: 7336
  source 1..203: mol_type = other DNA

SEQ ID NO: 31059 - DNA, 203 bp, synthetic construct; identical to SEQ ID NO: 7361
  source 1..203: mol_type = other DNA

SEQ ID NO: 31060 - DNA, 203 bp, synthetic construct; identical to SEQ ID NO: 7362
  source 1..203: mol_type = other DNA

SEQ ID NO: 31061 - DNA, 203 bp, synthetic construct; identical to SEQ ID NO: 7369
  source 1..203: mol_type = other DNA

SEQ ID NO: 31062 - DNA, 203 bp, synthetic construct; identical to SEQ ID NO: 7371
  source 1..203: mol_type = other DNA

SEQ ID NO: 31063 - DNA, 203 bp, synthetic construct; identical to SEQ ID NO: 7395
  source 1..203: mol_type = other DNA

SEQ ID NO: 31064 - DNA, 203 bp, synthetic construct; identical to SEQ ID NO: 7432
  source 1..203: mol_type = other DNA

SEQ ID NO: 31065 - DNA, 203 bp, synthetic construct; identical to SEQ ID NO: 7475
  source 1..203: mol_type = other DNA

SEQ ID NO: 31066 - DNA, 203 bp, synthetic construct; identical to SEQ ID NO: 7510
  source 1..203: mol_type = other DNA

SEQ ID NO: 31067 - DNA, 203 bp, synthetic construct; identical to SEQ ID NO: 7511
  source 1..203: mol_type = other DNA

SEQ ID NO: 31068 - DNA, 203 bp, synthetic construct; identical to SEQ ID NO: 7512
  source 1..203: mol_type = other DNA

SEQ ID NO: 31069 - DNA, 203 bp, synthetic construct; identical to SEQ ID NO: 7515
  source 1..203: mol_type = other DNA

SEQ ID NO: 31070 - DNA, 203 bp, synthetic construct; identical to SEQ ID NO: 7529
  source 1..203: mol_type = other DNA

SEQ ID NO: 31071 - DNA, 203 bp, synthetic construct; identical to SEQ ID NO: 7552
  source 1..203: mol_type = other DNA

SEQ ID NO: 31072 - DNA, 203 bp, synthetic construct; identical to SEQ ID NO: 7555
  source 1..203: mol_type = other DNA

SEQ ID NO: 31073 - DNA, 203 bp, synthetic construct; identical to SEQ ID NO: 7556
  source 1..203: mol_type = other DNA

SEQ ID NO: 31074 - DNA, 203 bp, synthetic construct; identical to SEQ ID NO: 7567
  source 1..203: mol_type = other DNA

SEQ ID NO: 31075 - DNA, 203 bp, synthetic construct; identical to SEQ ID NO: 7576
  source 1..203: mol_type = other DNA

SEQ ID NO: 31076 - DNA, 203 bp, synthetic construct; identical to SEQ ID NO: 7578
  source 1..203: mol_type = other DNA

SEQ ID NO: 31077 - DNA, 203 bp, synthetic construct; identical to SEQ ID NO: 7579
  source 1..203: mol_type = other DNA

SEQ ID NO: 31078 - DNA, 203 bp, synthetic construct; identical to SEQ ID NO: 7580
  source 1..203: mol_type = other DNA

SEQ ID NO: 31079 - DNA, 203 bp, synthetic construct; identical to SEQ ID NO: 7581
  source 1..203: mol_type = other DNA

SEQ ID NO: 31080 - DNA, 203 bp, synthetic construct; identical to SEQ ID NO: 7582
  source 1..203: mol_type = other DNA

SEQ ID NO: 31081 - DNA, 203 bp, synthetic construct; identical to SEQ ID NO: 7583
  source 1..203: mol_type = other DNA

SEQ ID NO: 31082 - DNA, 203 bp, synthetic construct; identical to SEQ ID NO: 7584
  source 1..203: mol_type = other DNA

SEQ ID NO: 31083 - DNA, 203 bp, synthetic construct; identical to SEQ ID NO: 7585
  source 1..203: mol_type = other DNA

SEQ ID NO: 31084 - DNA, 203 bp, synthetic construct; identical to SEQ ID NO: 7586
  source 1..203: mol_type = other DNA

SEQ ID NO: 31085 - DNA, 203 bp, synthetic construct; identical to SEQ ID NO: 7587
  source 1..203: mol_type = other DNA

SEQ ID NO: 31086 - DNA, 203 bp, synthetic construct; identical to SEQ ID NO: 7588
  source 1..203: mol_type = other DNA

SEQ ID NO: 31087 - DNA, 203 bp, synthetic construct; identical to SEQ ID NO: 7589
  source 1..203: mol_type = other DNA

SEQ ID NO: 31088 - DNA, 203 bp, synthetic construct; identical to SEQ ID NO: 7590
  source 1..203: mol_type = other DNA

SEQ ID NO: 31089 - DNA, 203 bp, synthetic construct; identical to SEQ ID NO: 7591
  source 1..203: mol_type = other DNA

SEQ ID NO: 31090 - DNA, 203 bp, synthetic construct; identical to SEQ ID NO: 7592
  source 1..203: mol_type = other DNA

SEQ ID NO: 31091 - DNA, 203 bp, synthetic construct; identical to SEQ ID NO: 7593
  source 1..203: mol_type = other DNA

SEQ ID NO: 31092 - DNA, 203 bp, synthetic construct; identical to SEQ ID NO: 7594
  source 1..203: mol_type = other DNA

SEQ ID NO: 31093 - DNA, 203 bp, synthetic construct; identical to SEQ ID NO: 7595
  source 1..203: mol_type = other DNA

SEQ ID NO: 31094 - DNA, 203 bp, synthetic construct; identical to SEQ ID NO: 7596
  source 1..203: mol_type = other DNA

SEQ ID NO: 31095 - DNA, 203 bp, synthetic construct; identical to SEQ ID NO: 7597
  source 1..203: mol_type = other DNA

SEQ ID NO: 31096 - DNA, 203 bp, synthetic construct; identical to SEQ ID NO: 7598
  source 1..203: mol_type = other DNA

SEQ ID NO: 31097 - DNA, 203 bp, synthetic construct; identical to SEQ ID NO: 7599
  source 1..203: mol_type = other DNA

SEQ ID NO: 31098 - DNA, 203 bp, synthetic construct; identical to SEQ ID NO: 7600
  source 1..203: mol_type = other DNA

SEQ ID NO: 31099 - DNA, 203 bp, synthetic construct; identical to SEQ ID NO: 7601
  source 1..203: mol_type = other DNA

SEQ ID NO: 31100 - DNA, 203 bp, synthetic construct; identical to SEQ ID NO: 7602
  source 1..203: mol_type = other DNA

SEQ ID NO: 31101 - DNA, 203 bp, synthetic construct; identical to SEQ ID NO: 7603
  source 1..203: mol_type = other DNA

SEQ ID NO: 31102 - DNA, 203 bp, synthetic construct; identical to SEQ ID NO: 7605
  source 1..203: mol_type = other DNA

SEQ ID NO: 31103 - DNA, 203 bp, synthetic construct; identical to SEQ ID NO: 7606
  source 1..203: mol_type = other DNA

SEQ ID NO: 31104 - DNA, 203 bp, synthetic construct; identical to SEQ ID NO: 7607
  source 1..203: mol_type = other DNA

SEQ ID NO: 31105 - DNA, 203 bp, synthetic construct; identical to SEQ ID NO: 7608
  source 1..203: mol_type = other DNA

SEQ ID NO: 31106 - DNA, 203 bp, synthetic construct; identical to SEQ ID NO: 7609
  source 1..203: mol_type = other DNA

SEQ ID NO: 31107 - DNA, 203 bp, synthetic construct; identical to SEQ ID NO: 7610
  source 1..203: mol_type = other DNA

SEQ ID NO: 31108 - DNA, 203 bp, synthetic construct; identical to SEQ ID NO: 7611
  source 1..203: mol_type = other DNA

SEQ ID NO: 31109 - DNA, 203 bp, synthetic construct; identical to SEQ ID NO: 7612
  source 1..203: mol_type = other DNA

SEQ ID NO: 31110 - DNA, 203 bp, synthetic construct; identical to SEQ ID NO: 7613
  source 1..203: mol_type = other DNA

SEQ ID NO: 31111 - DNA, 203 bp, synthetic construct; identical to SEQ ID NO: 7614
  source 1..203: mol_type = other DNA

SEQ ID NO: 31112 - DNA, 203 bp, synthetic construct; identical to SEQ ID NO: 7615
  source 1..203: mol_type = other DNA

SEQ ID NO: 31113 - DNA, 203 bp, synthetic construct; identical to SEQ ID NO: 7616
  source 1..203: mol_type = other DNA

SEQ ID NO: 31114 - DNA, 203 bp, synthetic construct; identical to SEQ ID NO: 7617
  source 1..203: mol_type = other DNA

SEQ ID NO: 31115 - DNA, 203 bp, synthetic construct; identical to SEQ ID NO: 7618
  source 1..203: mol_type = other DNA

SEQ ID NO: 31116 - DNA, 203 bp, synthetic construct; identical to SEQ ID NO: 7619
  source 1..203: mol_type = other DNA

SEQ ID NO: 31117 - DNA, 203 bp, synthetic construct; identical to SEQ ID NO: 7620
  source 1..203: mol_type = other DNA

SEQ ID NO: 31118 - DNA, 203 bp, synthetic construct; identical to SEQ ID NO: 7621
  source 1..203: mol_type = other DNA

SEQ ID NO: 31119 - DNA, 203 bp, synthetic construct; identical to SEQ ID NO: 7622
  source 1..203: mol_type = other DNA

SEQ ID NO: 31120 - DNA, 203 bp, synthetic construct; identical to SEQ ID NO: 7623
  source 1..203: mol_type = other DNA

SEQ ID NO: 31121 - DNA, 203 bp, synthetic construct; identical to SEQ ID NO: 7625
  source 1..203: mol_type = other DNA

SEQ ID NO: 31122 - DNA, 203 bp, synthetic construct; identical to SEQ ID NO: 7626
  source 1..203: mol_type = other DNA

SEQ ID NO: 31123 - DNA, 203 bp, synthetic construct; identical to SEQ ID NO: 7627
  source 1..203: mol_type = other DNA

SEQ ID NO: 31124 - DNA, 203 bp, synthetic construct; identical to SEQ ID NO: 7628
  source 1..203: mol_type = other DNA

SEQ ID NO: 31125 - DNA, 203 bp, synthetic construct; identical to SEQ ID NO: 7629
  source 1..203: mol_type = other DNA

SEQ ID NO: 31126 - DNA, 203 bp, synthetic construct; identical to SEQ ID NO: 7630
  source 1..203: mol_type = other DNA

SEQ ID NO: 31127 - DNA, 203 bp, synthetic construct; identical to SEQ ID NO: 7631
  source 1..203: mol_type = other DNA

SEQ ID NO: 31128 - DNA, 203 bp, synthetic construct; identical to SEQ ID NO: 7632
  source 1..203: mol_type = other DNA

SEQ ID NO: 31129 - DNA, 203 bp, synthetic construct; identical to SEQ ID NO: 7633
  source 1..203: mol_type = other DNA

SEQ ID NO: 31130 - DNA, 203 bp, synthetic construct; identical to SEQ ID NO: 7634
  source 1..203: mol_type = other DNA

SEQ ID NO: 31131 - DNA, 203 bp, synthetic construct; identical to SEQ ID NO: 7635
  source 1..203: mol_type = other DNA

SEQ ID NO: 31132 - DNA, 203 bp, synthetic construct; identical to SEQ ID NO: 7636
  source 1..203: mol_type = other DNA

SEQ ID NO: 31133 - DNA, 203 bp, synthetic construct; identical to SEQ ID NO: 7637
  source 1..203: mol_type = other DNA

SEQ ID NO: 31134 - DNA, 203 bp, synthetic construct; identical to SEQ ID NO: 7638
  source 1..203: mol_type = other DNA

SEQ ID NO: 31135 - DNA, 203 bp, synthetic construct; identical to SEQ ID NO: 7639
  source 1..203: mol_type = other DNA

SEQ ID NO: 31136 - DNA, 203 bp, synthetic construct; identical to SEQ ID NO: 7640
  source 1..203: mol_type = other DNA

SEQ ID NO: 31137 - DNA, 203 bp, synthetic construct; identical to SEQ ID NO: 7641
  source 1..203: mol_type = other DNA

SEQ ID NO: 31138 - DNA, 203 bp, synthetic construct; identical to SEQ ID NO: 7642
  source 1..203: mol_type = other DNA

SEQ ID NO: 31139 - DNA, 203 bp, synthetic construct; identical to SEQ ID NO: 7643
  source 1..203: mol_type = other DNA

SEQ ID NO: 31140 - DNA, 203 bp, synthetic construct; identical to SEQ ID NO: 7644
  source 1..203: mol_type = other DNA

SEQ ID NO: 31141 - DNA, 203 bp, synthetic construct; identical to SEQ ID NO: 7648
  source 1..203: mol_type = other DNA

SEQ ID NO: 31142 - DNA, 203 bp, synthetic construct; identical to SEQ ID NO: 7649
  source 1..203: mol_type = other DNA

SEQ ID NO: 31143 - DNA, 203 bp, synthetic construct; identical to SEQ ID NO: 7650
  source 1..203: mol_type = other DNA

SEQ ID NO: 31144 - DNA, 203 bp, synthetic construct; identical to SEQ ID NO: 7651
  source 1..203: mol_type = other DNA

SEQ ID NO: 31145 - DNA, 203 bp, synthetic construct; identical to SEQ ID NO: 7652
  source 1..203: mol_type = other DNA

SEQ ID NO: 31146 - DNA, 203 bp, synthetic construct; identical to SEQ ID NO: 7653
  source 1..203: mol_type = other DNA

SEQ ID NO: 31147 - DNA, 203 bp, synthetic construct; identical to SEQ ID NO: 7654
  source 1..203: mol_type = other DNA

SEQ ID NO: 31148 - DNA, 203 bp, synthetic construct; identical to SEQ ID NO: 7655
  source 1..203: mol_type = other DNA

SEQ ID NO: 31149 - DNA, 203 bp, synthetic construct; identical to SEQ ID NO: 7656
  source 1..203: mol_type = other DNA

SEQ ID NO: 31150 - DNA, 203 bp, synthetic construct; identical to SEQ ID NO: 7657
  source 1..203: mol_type = other DNA

SEQ ID NO: 31151 - DNA, 203 bp, synthetic construct; identical to SEQ ID NO: 7658
  source 1..203: mol_type = other DNA

SEQ ID NO: 31152 - DNA, 203 bp, synthetic construct; identical to SEQ ID NO: 7659
  source 1..203: mol_type = other DNA

SEQ ID NO: 31153 - DNA, 203 bp, synthetic construct; identical to SEQ ID NO: 7660
  source 1..203: mol_type = other DNA

SEQ ID NO: 31154 - DNA, 203 bp, synthetic construct; identical to SEQ ID NO: 7661
  source 1..203: mol_type = other DNA

SEQ ID NO: 31155 - DNA, 203 bp, synthetic construct; identical to SEQ ID NO: 7662
  source 1..203: mol_type = other DNA

SEQ ID NO: 31156 - DNA, 203 bp, synthetic construct; identical to SEQ ID NO: 7663
  source 1..203: mol_type = other DNA

SEQ ID NO: 31157 - DNA, 203 bp, synthetic construct; identical to SEQ ID NO: 7664
  source 1..203: mol_type = other DNA

SEQ ID NO: 31158 - DNA, 203 bp, synthetic construct; identical to SEQ ID NO: 7665
  source 1..203: mol_type = other DNA

SEQ ID NO: 31159 - DNA, 203 bp, synthetic construct; identical to SEQ ID NO: 7666
  source 1..203: mol_type = other DNA

SEQ ID NO: 31160 - DNA, 203 bp, synthetic construct; identical to SEQ ID NO: 7667
  source 1..203: mol_type = other DNA

SEQ ID NO: 31161 - DNA, 203 bp, synthetic construct; identical to SEQ ID NO: 7668
  source 1..203: mol_type = other DNA

SEQ ID NO: 31162 - DNA, 203 bp, synthetic construct; identical to SEQ ID NO: 7669
  source 1..203: mol_type = other DNA

SEQ ID NO: 31163 - DNA, 203 bp, synthetic construct; identical to SEQ ID NO: 7670
  source 1..203: mol_type = other DNA

SEQ ID NO: 31164 - DNA, 203 bp, synthetic construct; identical to SEQ ID NO: 7671
  source 1..203: mol_type = other DNA

SEQ ID NO: 31165 - DNA, 203 bp, synthetic construct; identical to SEQ ID NO: 7673
  source 1..203: mol_type = other DNA

SEQ ID NO: 31166 - DNA, 203 bp, synthetic construct; identical to SEQ ID NO: 7674
  source 1..203: mol_type = other DNA

SEQ ID NO: 31167 - DNA, 203 bp, synthetic construct; identical to SEQ ID NO: 7675
  source 1..203: mol_type = other DNA

SEQ ID NO: 31168 - DNA, 203 bp, synthetic construct; identical to SEQ ID NO: 7676
  source 1..203: mol_type = other DNA

SEQ ID NO: 31169 - DNA, 203 bp, synthetic construct; identical to SEQ ID NO: 7677
  source 1..203: mol_type = other DNA

SEQ ID NO: 31170 - DNA, 203 bp, synthetic construct; identical to SEQ ID NO: 7678
  source 1..203: mol_type = other DNA

SEQ ID NO: 31171 - DNA, 203 bp, synthetic construct; identical to SEQ ID NO: 7679
  source 1..203: mol_type = other DNA

SEQ ID NO: 31172 - DNA, 203 bp, synthetic construct; identical to SEQ ID NO: 7680
  source 1..203: mol_type = other DNA

SEQ ID NO: 31173 - DNA, 203 bp, synthetic construct; identical to SEQ ID NO: 7681
  source 1..203: mol_type = other DNA

SEQ ID NO: 31174 - DNA, 203 bp, synthetic construct; identical to SEQ ID NO: 7682
  source 1..203: mol_type = other DNA

SEQ ID NO: 31175 - DNA, 203 bp, synthetic construct; identical to SEQ ID NO: 7694
  source 1..203: mol_type = other DNA

SEQ ID NO: 31176 - DNA, 203 bp, synthetic construct; identical to SEQ ID NO: 7695
  source 1..203: mol_type = other DNA

SEQ ID NO: 31177 - DNA, 203 bp, synthetic construct; identical to SEQ ID NO: 7696
  source 1..203: mol_type = other DNA

SEQ ID NO: 31178 - DNA, 203 bp, synthetic construct; identical to SEQ ID NO: 7697
  source 1..203: mol_type = other DNA

SEQ ID NO: 31179 - DNA, 203 bp, synthetic construct; identical to SEQ ID NO: 7698
  source 1..203: mol_type = other DNA

SEQ ID NO: 31180 - DNA, 203 bp, synthetic construct; identical to SEQ ID NO: 7699
  source 1..203: mol_type = other DNA

SEQ ID NO: 31181 - DNA, 203 bp, synthetic construct; identical to SEQ ID NO: 7700
  source 1..203: mol_type = other DNA

SEQ ID NO: 31182 - DNA, 203 bp, synthetic construct; identical to SEQ ID NO: 7701
  source 1..203: mol_type = other DNA

SEQ ID NO: 31183 - DNA, 203 bp, synthetic construct; identical to SEQ ID NO: 7702
  source 1..203: mol_type = other DNA

SEQ ID NO: 31184 - DNA, 203 bp, synthetic construct; identical to SEQ ID NO: 7703
  source 1..203: mol_type = other DNA

SEQ ID NO: 31185 - DNA, 203 bp, synthetic construct; identical to SEQ ID NO: 7704
  source 1..203: mol_type = other DNA

SEQ ID NO: 31186 - DNA, 203 bp, synthetic construct; identical to SEQ ID NO: 7705
  source 1..203: mol_type = other DNA

SEQ ID NO: 31187 - DNA, 203 bp, synthetic construct; identical to SEQ ID NO: 7706
  source 1..203: mol_type = other DNA

SEQ ID NO: 31188 - DNA, 203 bp, synthetic construct; identical to SEQ ID NO: 7707
  source 1..203: mol_type = other DNA

SEQ ID NO: 31189 - DNA, 203 bp, synthetic construct; identical to SEQ ID NO: 7708
  source 1..203: mol_type = other DNA

SEQ ID NO: 31190 - DNA, 203 bp, synthetic construct; identical to SEQ ID NO: 7709
  source 1..203: mol_type = other DNA

SEQ ID NO: 31191 - DNA, 203 bp, synthetic construct; identical to SEQ ID NO: 7710
  source 1..203: mol_type = other DNA

SEQ ID NO: 31192 - DNA, 203 bp, synthetic construct; identical to SEQ ID NO: 7711
  source 1..203: mol_type = other DNA

SEQ ID NO: 31193 - DNA, 203 bp, synthetic construct; identical to SEQ ID NO: 7712
  source 1..203: mol_type = other DNA

SEQ ID NO: 31194 - DNA, 203 bp, synthetic construct; identical to SEQ ID NO: 7713
  source 1..203: mol_type = other DNA

SEQ ID NO: 31195 - DNA, 203 bp, synthetic construct; identical to SEQ ID NO: 7714
  source 1..203: mol_type = other DNA

SEQ ID NO: 31196 - DNA, 203 bp, synthetic construct; identical to SEQ ID NO: 7715
  source 1..203: mol_type = other DNA

SEQ ID NO: 31197 - DNA, 203 bp, synthetic construct; identical to SEQ ID NO: 7716
  source 1..203: mol_type = other DNA

SEQ ID NO: 31198 - DNA, 203 bp, synthetic construct; identical to SEQ ID NO: 7717
  source 1..203: mol_type = other DNA

SEQ ID NO: 31199 - DNA, 203 bp, synthetic construct; identical to SEQ ID NO: 7718
  source 1..203: mol_type = other DNA

SEQ ID NO: 31200 - DNA, 203 bp, synthetic construct; identical to SEQ ID NO: 7720
  source 1..203: mol_type = other DNA

SEQ ID NO: 31201 - DNA, 203 bp, synthetic construct; identical to SEQ ID NO: 7724
  source 1..203: mol_type = other DNA

SEQ ID NO: 31202 - DNA, 203 bp, synthetic construct; identical to SEQ ID NO: 7725
  source 1..203: mol_type = other DNA

SEQ ID NO: 31203 - DNA, 203 bp, synthetic construct; identical to SEQ ID NO: 7726
  source 1..203: mol_type = other DNA

SEQ ID NO: 31204 - DNA, 203 bp, synthetic construct; identical to SEQ ID NO: 7727
  source 1..203: mol_type = other DNA

SEQ ID NO: 31205 - DNA, 203 bp, synthetic construct; identical to SEQ ID NO: 7728
  source 1..203: mol_type = other DNA

SEQ ID NO: 31206 - DNA, 203 bp, synthetic construct; identical to SEQ ID NO: 7729
  source 1..203: mol_type = other DNA

SEQ ID NO: 31207 - DNA, 203 bp, synthetic construct; identical to SEQ ID NO: 7730
  source 1..203: mol_type = other DNA

SEQ ID NO: 31208 - DNA, 203 bp, synthetic construct; identical to SEQ ID NO: 7731
  source 1..203: mol_type = other DNA

SEQ ID NO: 31209 - DNA, 203 bp, synthetic construct; identical to SEQ ID NO: 7732
  source 1..203: mol_type = other DNA

SEQ ID NO: 31210 - DNA, 203 bp, synthetic construct; identical to SEQ ID NO: 7733
  source 1..203: mol_type = other DNA

SEQ ID NO: 31211 - DNA, 203 bp, synthetic construct; identical to SEQ ID NO: 7734
  source 1..203: mol_type = other DNA

SEQ ID NO: 31212 - DNA, 203 bp, synthetic construct; identical to SEQ ID NO: 7735
  source 1..203: mol_type = other DNA

SEQ ID NO: 31213 - DNA, 203 bp, synthetic construct; identical to SEQ ID NO: 7736
  source 1..203: mol_type = other DNA

SEQ ID NO: 31214 - DNA, 203 bp, synthetic construct; identical to SEQ ID NO: 7748
  source 1..203: mol_type = other DNA

SEQ ID NO: 31215 - DNA, 203 bp, synthetic construct; identical to SEQ ID NO: 7771
  source 1..203: mol_type = other DNA

SEQ ID NO: 31216 - DNA, 203 bp, synthetic construct; identical to SEQ ID NO: 7805
  source 1..203: mol_type = other DNA

SEQ ID NO: 31217 - DNA, 203 bp, synthetic construct; identical to SEQ ID NO: 7806
  source 1..203: mol_type = other DNA

SEQ ID NO: 31218 - DNA, 203 bp, synthetic construct; identical to SEQ ID NO: 7807
  source 1..203: mol_type = other DNA

SEQ ID NO: 31219 - DNA, 203 bp, synthetic construct; identical to SEQ ID NO: 7808
  source 1..203: mol_type = other DNA

SEQ ID NO: 31220 - DNA, 203 bp, synthetic construct; identical to SEQ ID NO: 7809
  source 1..203: mol_type = other DNA

SEQ ID NO: 31221 - DNA, 203 bp, synthetic construct; identical to SEQ ID NO: 7810
  source 1..203: mol_type = other DNA

SEQ ID NO: 31222 - DNA, 203 bp, synthetic construct; identical to SEQ ID NO: 7811
  source 1..203: mol_type = other DNA

SEQ ID NO: 31223 - DNA, 203 bp, synthetic construct; identical to SEQ ID NO: 7812
  source 1..203: mol_type = other DNA

SEQ ID NO: 31224 - DNA, 203 bp, synthetic construct; identical to SEQ ID NO: 7813
  source 1..203: mol_type = other DNA

SEQ ID NO: 31225 - DNA, 203 bp, synthetic construct; identical to SEQ ID NO: 7814
  source 1..203: mol_type = other DNA

SEQ ID NO: 31226 - DNA, 203 bp, synthetic construct; identical to SEQ ID NO: 7815
  source 1..203: mol_type = other DNA

SEQ ID NO: 31227 - DNA, 203 bp, synthetic construct; identical to SEQ ID NO: 7816
  source 1..203: mol_type = other DNA

SEQ ID NO: 31228 - DNA, 203 bp, synthetic construct; identical to SEQ ID NO: 7817
  source 1..203: mol_type = other DNA

SEQ ID NO: 31229 - DNA, 203 bp, synthetic construct; identical to SEQ ID NO: 7818
  source 1..203: mol_type = other DNA

SEQ ID NO: 31230 - DNA, 203 bp, synthetic construct; identical to SEQ ID NO: 7843
  source 1..203: mol_type = other DNA

SEQ ID NO: 31231 - DNA, 203 bp, synthetic construct; identical to SEQ ID NO: 7845
  source 1..203: mol_type = other DNA

SEQ ID NO: 31232 - DNA, 203 bp, synthetic construct; identical to SEQ ID NO: 7846
  source 1..203: mol_type = other DNA

SEQ ID NO: 31233 - DNA, 203 bp, synthetic construct; identical to SEQ ID NO: 7847
  source 1..203: mol_type = other DNA

SEQ ID NO: 31234 - DNA, 203 bp, synthetic construct; identical to SEQ ID NO: 7848
  source 1..203: mol_type = other DNA

SEQ ID NO: 31235 - DNA, 203 bp, synthetic construct; identical to SEQ ID NO: 7849
  source 1..203: mol_type = other DNA

SEQ ID NO: 31236 - DNA, 203 bp, synthetic construct; identical to SEQ ID NO: 7850
  source 1..203: mol_type = other DNA

SEQ ID NO: 31237 - DNA, 203 bp, synthetic construct; identical to SEQ ID NO: 7851
  source 1..203: mol_type = other DNA

SEQ ID NO: 31238 - DNA, 203 bp, synthetic construct; identical to SEQ ID NO: 7852
  source 1..203: mol_type = other DNA

SEQ ID NO: 31239 - DNA, 203 bp, synthetic construct; identical to SEQ ID NO: 7853
  source 1..203: mol_type = other DNA

SEQ ID NO: 31240 - DNA, 203 bp, synthetic construct; identical to SEQ ID NO: 7854
  source 1..203: mol_type = other DNA

SEQ ID NO: 31241 - DNA, 203 bp, synthetic construct; identical to SEQ ID NO: 7855
  source 1..203: mol_type = other DNA

SEQ ID NO: 31242 - DNA, 203 bp, synthetic construct; identical to SEQ ID NO: 7856
  source 1..203: mol_type = other DNA

SEQ ID NO: 31243 - DNA, 203 bp, synthetic construct; identical to SEQ ID NO: 7857
  source 1..203: mol_type = other DNA

SEQ ID NO: 31244 - DNA, 203 bp, synthetic construct; identical to SEQ ID NO: 7858
  source 1..203: mol_type = other DNA

SEQ ID NO: 31245 - DNA, 203 bp, synthetic construct; identical to SEQ ID NO: 7859
  source 1..203: mol_type = other DNA

SEQ ID NO: 31246 - DNA, 203 bp, synthetic construct; identical to SEQ ID NO: 7865
  source 1..203: mol_type = other DNA

SEQ ID NO: 31247 - DNA, 203 bp, synthetic construct; identical to SEQ ID NO: 7899
  source 1..203: mol_type = other DNA

SEQ ID NO: 31248 - DNA, 203 bp, synthetic construct; identical to SEQ ID NO: 7903
  source 1..203: mol_type = other DNA

SEQ ID NO: 31249 - DNA, 203 bp, synthetic construct; identical to SEQ ID NO: 7907
  source 1..203: mol_type = other DNA

SEQ ID NO: 31250 - DNA, 203 bp, synthetic construct; identical to SEQ ID NO: 7910
  source 1..203: mol_type = other DNA

SEQ ID NO: 31251 - DNA, 203 bp, synthetic construct; identical to SEQ ID NO: 7912
  source 1..203: mol_type = other DNA

SEQ ID NO: 31252 - DNA, 203 bp, synthetic construct; identical to SEQ ID NO: 7913
  source 1..203: mol_type = other DNA

SEQ ID NO: 31253 - DNA, 203 bp, synthetic construct; identical to SEQ ID NO: 7917
  source 1..203: mol_type = other DNA

SEQ ID NO: 31254 - DNA, 203 bp, synthetic construct; identical to SEQ ID NO: 7919
  source 1..203: mol_type = other DNA

SEQ ID NO: 31255 - DNA, 203 bp, synthetic construct; identical to SEQ ID NO: 7920
  source 1..203: mol_type = other DNA

SEQ ID NO: 31256 - DNA, 203 bp, synthetic construct; identical to SEQ ID NO: 7921
  source 1..203: mol_type = other DNA

SEQ ID NO: 31257 - DNA, 203 bp, synthetic construct; identical to SEQ ID NO: 7926
  source 1..203: mol_type = other DNA

SEQ ID NO: 31258 - DNA, 203 bp, synthetic construct; identical to SEQ ID NO: 7927
  source 1..203: mol_type = other DNA

SEQ ID NO: 31259 - DNA, 203 bp, synthetic construct; identical to SEQ ID NO: 7928
  source 1..203: mol_type = other DNA

SEQ ID NO: 31260 - DNA, 203 bp, synthetic construct; identical to SEQ ID NO: 7929
  source 1..203: mol_type = other DNA

SEQ ID NO: 31261 - DNA, 203 bp, synthetic construct; identical to SEQ ID NO: 7930
  source 1..203: mol_type = other DNA

SEQ ID NO: 31262 - DNA, 203 bp, synthetic construct; identical to SEQ ID NO: 7931
  source 1..203: mol_type = other DNA

SEQ ID NO: 31263 - DNA, 203 bp, synthetic construct; identical to SEQ ID NO: 7932
  source 1..203: mol_type = other DNA

SEQ ID NO: 31264 - DNA, 203 bp, synthetic construct; identical to SEQ ID NO: 7933
  source 1..203: mol_type = other DNA

SEQ ID NO: 31265 - DNA, 203 bp, synthetic construct; identical to SEQ ID NO: 7934
  source 1..203: mol_type = other DNA

SEQ ID NO: 31266 - DNA, 203 bp, synthetic construct; identical to SEQ ID NO: 7935
  source 1..203: mol_type = other DNA

SEQ ID NO: 31267 - DNA, 203 bp, synthetic construct; identical to SEQ ID NO: 7936
  source 1..203: mol_type = other DNA

SEQ ID NO: 31268 - DNA, 203 bp, synthetic construct; identical to SEQ ID NO: 7937
  source 1..203: mol_type = other DNA

SEQ ID NO: 31269 - DNA, 203 bp, synthetic construct; identical to SEQ ID NO: 7938
  source 1..203: mol_type = other DNA

SEQ ID NO: 31270 - DNA, 203 bp, synthetic construct; identical to SEQ ID NO: 7939
  source 1..203: mol_type = other DNA

SEQ ID NO: 31271 - DNA, 203 bp, synthetic construct; identical to SEQ ID NO: 7940
  source 1..203: mol_type = other DNA

SEQ ID NO: 31272 - DNA, 203 bp, synthetic construct; identical to SEQ ID NO: 7941
  source 1..203: mol_type = other DNA

SEQ ID NO: 31273 - DNA, 203 bp, synthetic construct; identical to SEQ ID NO: 7942
  source 1..203: mol_type = other DNA

SEQ ID NO: 31274 - DNA, 203 bp, synthetic construct; identical to SEQ ID NO: 7943
  source 1..203: mol_type = other DNA

SEQ ID NO: 31275 - DNA, 203 bp, synthetic construct; identical to SEQ ID NO: 7944
  source 1..203: mol_type = other DNA

SEQ ID NO: 31276 - DNA, 203 bp, synthetic construct; identical to SEQ ID NO: 7948
  source 1..203: mol_type = other DNA

SEQ ID NO: 31277 - DNA, 203 bp, synthetic construct; identical to SEQ ID NO: 7952
  source 1..203: mol_type = other DNA

SEQ ID NO: 31278 - DNA, 203 bp, synthetic construct; identical to SEQ ID NO: 7958
  source 1..203: mol_type = other DNA

SEQ ID NO: 31279 - DNA, 203 bp, synthetic construct; identical to SEQ ID NO: 7964
  source 1..203: mol_type = other DNA

SEQ ID NO: 31280 - DNA, 203 bp, synthetic construct; identical to SEQ ID NO: 7986
  source 1..203: mol_type = other DNA

SEQ ID NO: 31281 - DNA, 203 bp, synthetic construct; identical to SEQ ID NO: 8014
  source 1..203: mol_type = other DNA

SEQ ID NO: 31282 - DNA, 203 bp, synthetic construct; identical to SEQ ID NO: 8019
  source 1..203: mol_type = other DNA

SEQ ID NO: 31283 - DNA, 203 bp, synthetic construct; identical to SEQ ID NO: 8062
  source 1..203: mol_type = other DNA

SEQ ID NO: 31284 - DNA, 203 bp, synthetic construct; identical to SEQ ID NO: 8063
  source 1..203: mol_type = other DNA

SEQ ID NO: 31285 - DNA, 203 bp, synthetic construct; identical to SEQ ID NO: 8064
  source 1..203: mol_type = other DNA

SEQ ID NO: 31286 - DNA, 203 bp, synthetic construct; identical to SEQ ID NO: 8065
  source 1..203: mol_type = other DNA

SEQ ID NO: 31287 - DNA, 203 bp, synthetic construct; identical to SEQ ID NO: 8066
  source 1..203: mol_type = other DNA

SEQ ID NO: 31288 - DNA, 203 bp, synthetic construct; identical to SEQ ID NO: 8067
  source 1..203: mol_type = other DNA

SEQ ID NO: 31289 - DNA, 203 bp, synthetic construct; identical to SEQ ID NO: 8068
  source 1..203: mol_type = other DNA

SEQ ID NO: 31290 - DNA, 203 bp, synthetic construct; identical to SEQ ID NO: 8069
  source 1..203: mol_type = other DNA

SEQ ID NO: 31291 - DNA, 203 bp, synthetic construct; identical to SEQ ID NO: 8070
  source 1..203: mol_type = other DNA

SEQ ID NO: 31292 - DNA, 203 bp, synthetic construct; identical to SEQ ID NO: 8071
  source 1..203: mol_type = other DNA

SEQ ID NO: 31293 - DNA, 203 bp, synthetic construct; identical to SEQ ID NO: 8072
  source 1..203: mol_type = other DNA

SEQ ID NO: 31294 - DNA, 203 bp, synthetic construct; identical to SEQ ID NO: 8073
  source 1..203: mol_type = other DNA

SEQ ID NO: 31295 - DNA, 203 bp, synthetic construct; identical to SEQ ID NO: 8076
  source 1..203: mol_type = other DNA

SEQ ID NO: 31296 - DNA, 203 bp, synthetic construct; identical to SEQ ID NO: 8077
  source 1..203: mol_type = other DNA

SEQ ID NO: 31297 - DNA, 203 bp, synthetic construct; identical to SEQ ID NO: 8078
  source 1..203: mol_type = other DNA

SEQ ID NO: 31298 - DNA, 203 bp, synthetic construct; identical to SEQ ID NO: 8079
  source 1..203: mol_type = other DNA

SEQ ID NO: 31299 - DNA, 203 bp, synthetic construct; identical to SEQ ID NO: 8080
  source 1..203: mol_type = other DNA

SEQ ID NO: 31300 - DNA, 203 bp, synthetic construct; identical to SEQ ID NO: 8081
  source 1..203: mol_type = other DNA

SEQ ID NO: 31301 - DNA, 203 bp, synthetic construct; identical to SEQ ID NO: 8082
  source 1..203: mol_type = other DNA

SEQ ID NO: 31302 - DNA, 203 bp, synthetic construct; identical to SEQ ID NO: 8083
  source 1..203: mol_type = other DNA

SEQ ID NO: 31303 - DNA, 203 bp, synthetic construct; identical to SEQ ID NO: 8084
  source 1..203: mol_type = other DNA

SEQ ID NO: 31304 - DNA, 203 bp, synthetic construct; identical to SEQ ID NO: 8085
  source 1..203: mol_type = other DNA

SEQ ID NO: 31305 - DNA, 203 bp, synthetic construct; identical to SEQ ID NO: 8086
  source 1..203: mol_type = other DNA

SEQ ID NO: 31306 - DNA, 203 bp, synthetic construct; identical to SEQ ID NO: 8087
  source 1..203: mol_type = other DNA

SEQ ID NO: 31307 - DNA, 203 bp, synthetic construct; identical to SEQ ID NO: 8088
  source 1..203: mol_type = other DNA

SEQ ID NO: 31308 - DNA, 203 bp, synthetic construct; identical to SEQ ID NO: 8089
  source 1..203: mol_type = other DNA

SEQ ID NO: 31309 - DNA, 203 bp, synthetic construct; identical to SEQ ID NO: 8104
  source 1..203: mol_type = other DNA

SEQ ID NO: 31310 - DNA, 203 bp, synthetic construct; identical to SEQ ID NO: 8105
  source 1..203: mol_type = other DNA

SEQ ID NO: 31311 - DNA, 203 bp, synthetic construct; identical to SEQ ID NO: 8106
  source 1..203: mol_type = other DNA

SEQ ID NO: 31312 - DNA, 203 bp, synthetic construct; identical to SEQ ID NO: 8107
  source 1..203: mol_type = other DNA

SEQ ID NO: 31313 - DNA, 203 bp, synthetic construct; identical to SEQ ID NO: 8108
  source 1..203: mol_type = other DNA

SEQ ID NO: 31314 - DNA, 203 bp, synthetic construct; identical to SEQ ID NO: 8109
  source 1..203: mol_type = other DNA

SEQ ID NO: 31315 - DNA, 203 bp, synthetic construct; identical to SEQ ID NO: 8110
  source 1..203: mol_type = other DNA

SEQ ID NO: 31316 - DNA, 203 bp, synthetic construct; identical to SEQ ID NO: 8111
  source 1..203: mol_type = other DNA

SEQ ID NO: 31317 - DNA, 203 bp, synthetic construct; identical to SEQ ID NO: 8112
  source 1..203: mol_type = other DNA

SEQ ID NO: 31318 - DNA, 203 bp, synthetic construct; identical to SEQ ID NO: 8113
  source 1..203: mol_type = other DNA

SEQ ID NO: 31319 - DNA, 203 bp, synthetic construct; identical to SEQ ID NO: 8138
  source 1..203: mol_type = other DNA

SEQ ID NO: 31320 - DNA, 203 bp, synthetic construct; identical to SEQ ID NO: 8139
  source 1..203: mol_type = other DNA

SEQ ID NO: 31321 - DNA, 203 bp, synthetic construct; identical to SEQ ID NO: 8140
  source 1..203: mol_type = other DNA

SEQ ID NO: 31322 - DNA, 203 bp, synthetic construct; identical to SEQ ID NO: 8141
  source 1..203: mol_type = other DNA

SEQ ID NO: 31323 - DNA, 203 bp, synthetic construct; identical to SEQ ID NO: 8142
  source 1..203: mol_type = other DNA

SEQ ID NO: 31324 - DNA, 203 bp, synthetic construct; identical to SEQ ID NO: 8143
  source 1..203: mol_type = other DNA

SEQ ID NO: 31325 - DNA, 203 bp, synthetic construct; identical to SEQ ID NO: 8144
  source 1..203: mol_type = other DNA

SEQ ID NO: 31326 - DNA, 203 bp, synthetic construct; identical to SEQ ID NO: 8145
  source 1..203: mol_type = other DNA

SEQ ID NO: 31327 - DNA, 203 bp, synthetic construct; identical to SEQ ID NO: 8146
  source 1..203: mol_type = other DNA

SEQ ID NO: 31328 - DNA, 203 bp, synthetic construct; identical to SEQ ID NO: 8147
  source 1..203: mol_type = other DNA

SEQ ID NO: 31329 - DNA, 203 bp, synthetic construct; identical to SEQ ID NO: 8148
  source 1..203: mol_type = other DNA

SEQ ID NO: 31330 - DNA, 203 bp, synthetic construct; identical to SEQ ID NO: 8149
  source 1..203: mol_type = other DNA

SEQ ID NO: 31331 - DNA, 203 bp, synthetic construct; identical to SEQ ID NO: 8150
  source 1..203: mol_type = other DNA

SEQ ID NO: 31332 - DNA, 203 bp, synthetic construct; identical to SEQ ID NO: 8151
  source 1..203: mol_type = other DNA

SEQ ID NO: 31333 - DNA, 203 bp, synthetic construct; identical to SEQ ID NO: 8152
  source 1..203: mol_type = other DNA

SEQ ID NO: 31334 - DNA, 203 bp, synthetic construct; identical to SEQ ID NO: 8153
  source 1..203: mol_type = other DNA

SEQ ID NO: 31335 - DNA, 203 bp, synthetic construct; identical to SEQ ID NO: 8154
  source 1..203: mol_type = other DNA

SEQ ID NO: 31336 - DNA, 203 bp, synthetic construct; identical to SEQ ID NO: 8155
  source 1..203: mol_type = other DNA

SEQ ID NO: 31337 - DNA, 203 bp, synthetic construct; identical to SEQ ID NO: 8156
  source 1..203: mol_type = other DNA

SEQ ID NO: 31338 - DNA, 203 bp, synthetic construct; identical to SEQ ID NO: 8157
  source 1..203: mol_type = other DNA

SEQ ID NO: 31339 - DNA, 203 bp, synthetic construct; identical to SEQ ID NO: 8158
  source 1..203: mol_type = other DNA

SEQ ID NO: 31340 - DNA, 203 bp, synthetic construct; identical to SEQ ID NO: 8159
  source 1..203: mol_type = other DNA

SEQ ID NO: 31341 - DNA, 203 bp, synthetic construct; identical to SEQ ID NO: 8160
  source 1..203: mol_type = other DNA

SEQ ID NO: 31342 - DNA, 203 bp, synthetic construct; identical to SEQ ID NO: 8169
  source 1..203: mol_type = other DNA

SEQ ID NO: 31343 - DNA, 203 bp, synthetic construct; identical to SEQ ID NO: 8171
  source 1..203: mol_type = other DNA

SEQ ID NO: 31344 - DNA, 203 bp, synthetic construct; identical to SEQ ID NO: 8173
  source 1..203: mol_type = other DNA

SEQ ID NO: 31345 - DNA, 203 bp, synthetic construct; identical to SEQ ID NO: 8193
  source 1..203: mol_type = other DNA

SEQ ID NO: 31346 - DNA, 203 bp, synthetic construct; identical to SEQ ID NO: 8196
  source 1..203: mol_type = other DNA

SEQ ID NO: 31347 - DNA, 203 bp, synthetic construct; identical to SEQ ID NO: 8199
  source 1..203: mol_type = other DNA

SEQ ID NO: 31348 - DNA, 203 bp, synthetic construct; identical to SEQ ID NO: 8225
  source 1..203: mol_type = other DNA

SEQ ID NO: 31349 - DNA, 203 bp, synthetic construct; identical to SEQ ID NO: 8239
  source 1..203: mol_type = other DNA

SEQ ID NO: 31350 - DNA, 203 bp, synthetic construct; identical to SEQ ID NO: 8266
  source 1..203: mol_type = other DNA

SEQ ID NO: 31351 - DNA, 203 bp, synthetic construct; identical to SEQ ID NO: 8269
  source 1..203: mol_type = other DNA

SEQ ID NO: 31352 - DNA, 203 bp, synthetic construct; identical to SEQ ID NO: 8270
  source 1..203: mol_type = other DNA

SEQ ID NO: 31353 - DNA, 203 bp, synthetic construct; identical to SEQ ID NO: 8271
  source 1..203: mol_type = other DNA

SEQ ID NO: 31354 - DNA, 203 bp, synthetic construct; identical to SEQ ID NO: 8272
  source 1..203: mol_type = other DNA

SEQ ID NO: 31355 - DNA, 203 bp, synthetic construct; identical to SEQ ID NO: 8273
  source 1..203: mol_type = other DNA

SEQ ID NO: 31356 - DNA, 203 bp, synthetic construct; identical to SEQ ID NO: 8274
  source 1..203: mol_type = other DNA

SEQ ID NO: 31357 - DNA, 203 bp, synthetic construct; identical to SEQ ID NO: 8275
  source 1..203: mol_type = other DNA

SEQ ID NO: 31358 - DNA, 203 bp, synthetic construct; identical to SEQ ID NO: 8276
  source 1..203: mol_type = other DNA

SEQ ID NO: 31359 - DNA, 203 bp, synthetic construct; identical to SEQ ID NO: 8277
  source 1..203: mol_type = other DNA

SEQ ID NO: 31360 - DNA, 203 bp, synthetic construct; identical to SEQ ID NO: 8278
  source 1..203: mol_type = other DNA

SEQ ID NO: 31361 - DNA, 203 bp, synthetic construct; identical to SEQ ID NO: 8279
  source 1..203: mol_type = other DNA

SEQ ID NO: 31362 - DNA, 203 bp, synthetic construct; identical to SEQ ID NO: 8280
  source 1..203: mol_type = other DNA

SEQ ID NO: 31363 - DNA, 203 bp, synthetic construct; identical to SEQ ID NO: 8281
  source 1..203: mol_type = other DNA

SEQ ID NO: 31364 - DNA, 203 bp, synthetic construct; identical to SEQ ID NO: 8282
  source 1..203: mol_type = other DNA

SEQ ID NO: 31365 - DNA, 203 bp, synthetic construct; identical to SEQ ID NO: 8283
  source 1..203: mol_type = other DNA

SEQ ID NO: 31366 - DNA, 203 bp, synthetic construct; identical to SEQ ID NO: 8284
  source 1..203: mol_type = other DNA

SEQ ID NO: 31367 - DNA, 203 bp, synthetic construct; identical to SEQ ID NO: 8295
  source 1..203: mol_type = other DNA

SEQ ID NO: 31368 - DNA, 203 bp, synthetic construct; identical to SEQ ID NO: 8315
  source 1..203: mol_type = other DNA

SEQ ID NO: 31369 - DNA, 203 bp, synthetic construct; identical to SEQ ID NO: 8329
  source 1..203: mol_type = other DNA

SEQ ID NO: 31370 - DNA, 203 bp, synthetic construct; identical to SEQ ID NO: 8331
  source 1..203: mol_type = other DNA

SEQ ID NO: 31371 - DNA, 203 bp, synthetic construct; identical to SEQ ID NO: 8332
  source 1..203: mol_type = other DNA

SEQ ID NO: 31372 - DNA, 203 bp, synthetic construct; identical to SEQ ID NO: 8333
  source 1..203: mol_type = other DNA

SEQ ID NO: 31373 - DNA, 203 bp, synthetic construct; identical to SEQ ID NO: 8334
  source 1..203: mol_type = other DNA

SEQ ID NO: 31374 - DNA, 203 bp, synthetic construct; identical to SEQ ID NO: 8335
  source 1..203: mol_type = other DNA

SEQ ID NO: 31375 - DNA, 203 bp, synthetic construct; identical to SEQ ID NO: 8336
  source 1..203: mol_type = other DNA

SEQ ID NO: 31376 - DNA, 203 bp, synthetic construct; identical to SEQ ID NO: 8337
  source 1..203: mol_type = other DNA

SEQ ID NO: 31377 - DNA, 203 bp, synthetic construct; identical to SEQ ID NO: 8338
  source 1..203: mol_type = other DNA

SEQ ID NO: 31378 - DNA, 203 bp, synthetic construct; identical to SEQ ID NO: 8339
  source 1..203: mol_type = other DNA

SEQ ID NO: 31379 - DNA, 203 bp, synthetic construct; identical to SEQ ID NO: 8340
  source 1..203: mol_type = other DNA

SEQ ID NO: 31380 - DNA, 203 bp, synthetic construct; identical to SEQ ID NO: 8341
  source 1..203: mol_type = other DNA

SEQ ID NO: 31381 - DNA, 203 bp, synthetic construct; identical to SEQ ID NO: 8342
  source 1..203: mol_type = other DNA

SEQ ID NO: 31382 - DNA, 203 bp, synthetic construct; identical to SEQ ID NO: 8368
  source 1..203: mol_type = other DNA

SEQ ID NO: 31383 - DNA, 203 bp, synthetic construct; identical to SEQ ID NO: 8369
  source 1..203: mol_type = other DNA

SEQ ID NO: 31384 - DNA, 203 bp, synthetic construct; identical to SEQ ID NO: 8370
  source 1..203: mol_type = other DNA

SEQ ID NO: 31385 - DNA, 203 bp, synthetic construct; identical to SEQ ID NO: 8371
  source 1..203: mol_type = other DNA

SEQ ID NO: 31386 - DNA, 203 bp, synthetic construct; identical to SEQ ID NO: 8372
  source 1..203: mol_type = other DNA

SEQ ID NO: 31387 - DNA, 203 bp, synthetic construct; identical to SEQ ID NO: 8373
  source 1..203: mol_type = other DNA

SEQ ID NO: 31388 - DNA, 203 bp, synthetic construct; identical to SEQ ID NO: 8374
  source 1..203: mol_type = other DNA

SEQ ID NO: 31389 - DNA, 203 bp, synthetic construct; identical to SEQ ID NO: 8375
  source 1..203: mol_type = other DNA

SEQ ID NO: 31390 - DNA, 203 bp, synthetic construct; identical to SEQ ID NO: 8379
  source 1..203: mol_type = other DNA

SEQ ID NO: 31391 - DNA, 203 bp, synthetic construct; identical to SEQ ID NO: 8380
  source 1..203: mol_type = other DNA

SEQ ID NO: 31392 - DNA, 203 bp, synthetic construct; identical to SEQ ID NO: 8381
  source 1..203: mol_type = other DNA

SEQ ID NO: 31393 - DNA, 203 bp, synthetic construct; identical to SEQ ID NO: 8382
  source 1..203: mol_type = other DNA

SEQ ID NO: 31394 - DNA, 203 bp, synthetic construct; identical to SEQ ID NO: 8383
  source 1..203: mol_type = other DNA

SEQ ID NO: 31395 - DNA, 203 bp, synthetic construct; identical to SEQ ID NO: 8384
  source 1..203: mol_type = other DNA

SEQ ID NO: 31396 - DNA, 203 bp, synthetic construct; identical to SEQ ID NO: 8385
  source 1..203: mol_type = other DNA

SEQ ID NO: 31397 - DNA, 203 bp, synthetic construct; identical to SEQ ID NO: 8386
  source 1..203: mol_type = other DNA

SEQ ID NO: 31398 - DNA, 203 bp, synthetic construct; identical to SEQ ID NO: 8387
  source 1..203: mol_type = other DNA

SEQ ID NO: 31399 - DNA, 203 bp, synthetic construct; identical to SEQ ID NO: 8388
  source 1..203: mol_type = other DNA

SEQ ID NO: 31400 - DNA, 203 bp, synthetic construct; identical to SEQ ID NO: 8407
  source 1..203: mol_type = other DNA

SEQ ID NO: 31401 - DNA, 203 bp, synthetic construct; identical to SEQ ID NO: 8422
  source 1..203: mol_type = other DNA

SEQ ID NO: 31402 - DNA, 203 bp, synthetic construct; identical to SEQ ID NO: 8442
  source 1..203: mol_type = other DNA

SEQ ID NO: 31403 - DNA, 203 bp, synthetic construct; identical to SEQ ID NO: 8451
  source 1..203: mol_type = other DNA

SEQ ID NO: 31404 - DNA, 203 bp, synthetic construct; identical to SEQ ID NO: 8469
  source 1..203: mol_type = other DNA

SEQ ID NO: 31405 - DNA, 203 bp, synthetic construct; identical to SEQ ID NO: 8490
  source 1..203: mol_type = other DNA

SEQ ID NO: 31406 - DNA, 203 bp, synthetic construct; identical to SEQ ID NO: 8493
  source 1..203: mol_type = other DNA

SEQ ID NO: 31407 - DNA, 203 bp, synthetic construct; identical to SEQ ID NO: 8506
  source 1..203: mol_type = other DNA

SEQ ID NO: 31408 - DNA, 203 bp, synthetic construct; identical to SEQ ID NO: 8538
  source 1..203: mol_type = other DNA

SEQ ID NO: 31409 - DNA, 203 bp, synthetic construct; identical to SEQ ID NO: 8539
  source 1..203: mol_type = other DNA

SEQ ID NO: 31410 - DNA, 203 bp, synthetic construct; identical to SEQ ID NO: 8540
  source 1..203: mol_type = other DNA

SEQ ID NO: 31411 - DNA, 203 bp, synthetic construct; identical to SEQ ID NO: 8541
  source 1..203: mol_type = other DNA

SEQ ID NO: 31412 - DNA, 203 bp, synthetic construct; identical to SEQ ID NO: 8542
  source 1..203: mol_type = other DNA

SEQ ID NO: 31413 - DNA, 203 bp, synthetic construct; identical to SEQ ID NO: 8543
  source 1..203: mol_type = other DNA

SEQ ID NO: 31414 - DNA, 203 bp, synthetic construct; identical to SEQ ID NO: 8544
  source 1..203: mol_type = other DNA

SEQ ID NO: 31415 - DNA, 203 bp, synthetic construct; identical to SEQ ID NO: 8545
  source 1..203: mol_type = other DNA

SEQ ID NO: 31416 - DNA, 203 bp, synthetic construct; identical to SEQ ID NO: 8546
  source 1..203: mol_type = other DNA

SEQ ID NO: 31417 - DNA, 203 bp, synthetic construct; identical to SEQ ID NO: 8547
  source 1..203: mol_type = other DNA

SEQ ID NO: 31418 - DNA, 203 bp, synthetic construct; identical to SEQ ID NO: 8548
  source 1..203: mol_type = other DNA

SEQ ID NO: 31419 - DNA, 203 bp, synthetic construct; identical to SEQ ID NO: 8549
  source 1..203: mol_type = other DNA

SEQ ID NO: 31420 - DNA, 203 bp, synthetic construct; identical to SEQ ID NO: 8577
  source 1..203: mol_type = other DNA

SEQ ID NO: 31421 - DNA, 203 bp, synthetic construct; identical to SEQ ID NO: 8578
  source 1..203: mol_type = other DNA

SEQ ID NO: 31422 - DNA, 203 bp, synthetic construct; identical to SEQ ID NO: 8579
  source 1..203: mol_type = other DNA

SEQ ID NO: 31423 - DNA, 203 bp, synthetic construct; identical to SEQ ID NO: 8580
  source 1..203: mol_type = other DNA

SEQ ID NO: 31424 - DNA, 203 bp, synthetic construct; identical to SEQ ID NO: 8581
  source 1..203: mol_type = other DNA

SEQ ID NO: 31425 - DNA, 203 bp, synthetic construct; identical to SEQ ID NO: 8582
  source 1..203: mol_type = other DNA

SEQ ID NO: 31426 - DNA, 203 bp, synthetic construct; identical to SEQ ID NO: 8583
  source 1..203: mol_type = other DNA

SEQ ID NO: 31427 - DNA, 203 bp, synthetic construct; identical to SEQ ID NO: 8584
  source 1..203: mol_type = other DNA

SEQ ID NO: 31428 - DNA, 203 bp, synthetic construct; identical to SEQ ID NO: 8585
  source 1..203: mol_type = other DNA

SEQ ID NO: 31429 - DNA, 203 bp, synthetic construct; identical to SEQ ID NO: 8586
  source 1..203: mol_type = other DNA

SEQ ID NO: 31430 - DNA, 203 bp, synthetic construct; identical to SEQ ID NO: 8587
  source 1..203: mol_type = other DNA

SEQ ID NO: 31431 - DNA, 203 bp, synthetic construct; identical to SEQ ID NO: 8588
  source 1..203: mol_type = other DNA

SEQ ID NO: 31432 - DNA, 203 bp, synthetic construct; identical to SEQ ID NO: 8589
  source 1..203: mol_type = other DNA

SEQ ID NO: 31433 - DNA, 203 bp, synthetic construct; identical to SEQ ID NO: 8590
  source 1..203: mol_type = other DNA

SEQ ID NO: 31434 - DNA, 203 bp, synthetic construct; identical to SEQ ID NO: 8591
  source 1..203: mol_type = other DNA

SEQ ID NO: 31435 - DNA, 203 bp, synthetic construct; identical to SEQ ID NO: 8592
  source 1..203: mol_type = other DNA

SEQ ID NO: 31436 - DNA, 203 bp, synthetic construct; identical to SEQ ID NO: 8593
  source 1..203: mol_type = other DNA

SEQ ID NO: 31437 - DNA, 203 bp, synthetic construct; identical to SEQ ID NO: 8594
  source 1..203: mol_type = other DNA

SEQ ID NO: 31438 - DNA, 203 bp, synthetic construct; identical to SEQ ID NO: 8595
  source 1..203: mol_type = other DNA

SEQ ID NO: 31439 - DNA, 203 bp, synthetic construct; identical to SEQ ID NO: 8596
  source 1..203: mol_type = other DNA

SEQ ID NO: 31440 - DNA, 203 bp, synthetic construct; identical to SEQ ID NO: 8597
  source 1..203: mol_type = other DNA

SEQ ID NO: 31441 - DNA, 203 bp, synthetic construct; identical to SEQ ID NO: 8598
  source 1..203: mol_type = other DNA

SEQ ID NO: 31442 - DNA, 203 bp, synthetic construct; identical to SEQ ID NO: 8599
  source 1..203: mol_type = other DNA

SEQ ID NO: 31443 - DNA, 203 bp, synthetic construct; identical to SEQ ID NO: 8600
  source 1..203: mol_type = other DNA

SEQ ID NO: 31444 - DNA, 203 bp, synthetic construct; identical to SEQ ID NO: 8601
  source 1..203: mol_type = other DNA

SEQ ID NO: 31445 - DNA, 203 bp, synthetic construct; identical to SEQ ID NO: 8602
  source 1..203: mol_type = other DNA

SEQ ID NO: 31446 - DNA, 203 bp, synthetic construct; identical to SEQ ID NO: 8605
  source 1..203: mol_type = other DNA

SEQ ID NO: 31447 - DNA, 203 bp, synthetic construct; identical to SEQ ID NO: 8606
  source 1..203: mol_type = other DNA

SEQ ID NO: 31448 - DNA, 203 bp, synthetic construct; identical to SEQ ID NO: 8607
  source 1..203: mol_type = other DNA

SEQ ID NO: 31449 - DNA, 203 bp, synthetic construct; identical to SEQ ID NO: 8608
  source 1..203: mol_type = other DNA

SEQ ID NO: 31450 - DNA, 203 bp, synthetic construct; identical to SEQ ID NO: 8609
  source 1..203: mol_type = other DNA

SEQ ID NO: 31451 - DNA, 203 bp, synthetic construct; identical to SEQ ID NO: 8610
  source 1..203: mol_type = other DNA

SEQ ID NO: 31452 - DNA, 203 bp, synthetic construct; identical to SEQ ID NO: 8611
  source 1..203: mol_type = other DNA

SEQ ID NO: 31453 - DNA, 203 bp, synthetic construct; identical to SEQ ID NO: 8612
  source 1..203: mol_type = other DNA

SEQ ID NO: 31454 - DNA, 203 bp, synthetic construct; identical to SEQ ID NO: 8613
  source 1..203: mol_type = other DNA

SEQ ID NO: 31455 - DNA, 203 bp, synthetic construct; identical to SEQ ID NO: 8614
  source 1..203: mol_type = other DNA

SEQ ID NO: 31456 - DNA, 203 bp, synthetic construct; identical to SEQ ID NO: 8615
  source 1..203: mol_type = other DNA

SEQ ID NO: 31457 - DNA, 203 bp, synthetic construct; identical to SEQ ID NO: 8616
  source 1..203: mol_type = other DNA

SEQ ID NO: 31458 - DNA, 203 bp, synthetic construct; identical to SEQ ID NO: 8617
  source 1..203: mol_type = other DNA

SEQ ID NO: 31459 - DNA, 203 bp, synthetic construct; identical to SEQ ID NO: 8618
  source 1..203: mol_type = other DNA

SEQ ID NO: 31460 - DNA, 203 bp, synthetic construct; identical to SEQ ID NO: 8619
  source 1..203: mol_type = other DNA

SEQ ID NO: 31461 - DNA, 203 bp, synthetic construct; identical to SEQ ID NO: 8620
  source 1..203: mol_type = other DNA

SEQ ID NO: 31462 - DNA, 203 bp, synthetic construct; identical to SEQ ID NO: 8621
  source 1..203: mol_type = other DNA

SEQ ID NO: 31463 - DNA, 203 bp, synthetic construct; identical to SEQ ID NO: 8632
  source 1..203: mol_type = other DNA

SEQ ID NO: 31464 - DNA, 203 bp, synthetic construct; identical to SEQ ID NO: 8651
  source 1..203: mol_type = other DNA

SEQ ID NO: 31465 - DNA, 203 bp, synthetic construct; identical to SEQ ID NO: 8652
  source 1..203: mol_type = other DNA

SEQ ID NO: 31466 - DNA, 203 bp, synthetic construct; identical to SEQ ID NO: 8653
  source 1..203: mol_type = other DNA

SEQ ID NO: 31467 - DNA, 203 bp, synthetic construct; identical to SEQ ID NO: 8654
  source 1..203: mol_type = other DNA

SEQ ID NO: 31468 - DNA, 203 bp, synthetic construct; identical to SEQ ID NO: 8655
  source 1..203: mol_type = other DNA

SEQ ID NO: 31469 - DNA, 203 bp, synthetic construct; identical to SEQ ID NO: 8656
  source 1..203: mol_type = other DNA

SEQ ID NO: 31470 - DNA, 203 bp, synthetic construct; identical to SEQ ID NO: 8660
  source 1..203: mol_type = other DNA

SEQ ID NO: 31471 - DNA, 203 bp, synthetic construct; identical to SEQ ID NO: 8661
  source 1..203: mol_type = other DNA

SEQ ID NO: 31472 - DNA, 203 bp, synthetic construct; identical to SEQ ID NO: 8662
  source 1..203: mol_type = other DNA

SEQ ID NO: 31473 - DNA, 203 bp, synthetic construct; identical to SEQ ID NO: 8663
  source 1..203: mol_type = other DNA

SEQ ID NO: 31474 - DNA, 203 bp, synthetic construct; identical to SEQ ID NO: 8664
  source 1..203: mol_type = other DNA

SEQ ID NO: 31475 - DNA, 203 bp, synthetic construct; identical to SEQ ID NO: 8665
  source 1..203: mol_type = other DNA

SEQ ID NO: 31476 - DNA, 203 bp, synthetic construct; identical to SEQ ID NO: 8666
  source 1..203: mol_type = other DNA

SEQ ID NO: 31477 - DNA, 203 bp, synthetic construct; identical to SEQ ID NO: 8667
  source 1..203: mol_type = other DNA

SEQ ID NO: 31478 - DNA, 203 bp, synthetic construct; identical to SEQ ID NO: 8668
  source 1..203: mol_type = other DNA

SEQ ID NO: 31479 - DNA, 203 bp, synthetic construct; identical to SEQ ID NO: 8669
  source 1..203: mol_type = other DNA

SEQ ID NO: 31480 - DNA, 203 bp, synthetic construct; identical to SEQ ID NO: 8670
  source 1..203: mol_type = other DNA

SEQ ID NO: 31481 - DNA, 203 bp, synthetic construct; identical to SEQ ID NO: 8679
  source 1..203: mol_type = other DNA

SEQ ID NO: 31482 - DNA, 203 bp, synthetic construct; identical to SEQ ID NO: 8697
  source 1..203: mol_type = other DNA

SEQ ID NO: 31483 - DNA, 203 bp, synthetic construct; identical to SEQ ID NO: 8722
  source 1..203: mol_type = other DNA

SEQ ID NO: 31484 - DNA, 203 bp, synthetic construct; identical to SEQ ID NO: 8723
  source 1..203: mol_type = other DNA

SEQ ID NO: 31485 - DNA, 203 bp, synthetic construct; identical to SEQ ID NO: 8724
  source 1..203: mol_type = other DNA

SEQ ID NO: 31486 - DNA, 203 bp, synthetic construct; identical to SEQ ID NO: 8725
  source 1..203: mol_type = other DNA

SEQ ID NO: 31487 - DNA, 203 bp, synthetic construct; identical to SEQ ID NO: 8726
  source 1..203: mol_type = other DNA

SEQ ID NO: 31488 - DNA, 203 bp, synthetic construct; identical to SEQ ID NO: 8727
  source 1..203: mol_type = other DNA

SEQ ID NO: 31489 - DNA, 203 bp, synthetic construct; identical to SEQ ID NO: 8728
  source 1..203: mol_type = other DNA

SEQ ID NO: 31490 - DNA, 203 bp, synthetic construct; identical to SEQ ID NO: 8729
  source 1..203: mol_type = other DNA

SEQ ID NO: 31491 - DNA, 203 bp, synthetic construct; identical to SEQ ID NO: 8730
  source 1..203: mol_type = other DNA

SEQ ID NO: 31492 - DNA, 203 bp, synthetic construct; identical to SEQ ID NO: 8731
  source 1..203: mol_type = other DNA

SEQ ID NO: 31493 - DNA, 203 bp, synthetic construct; identical to SEQ ID NO: 8732
  source 1..203: mol_type = other DNA

SEQ ID NO: 31494 - DNA, 203 bp, synthetic construct; identical to SEQ ID NO: 8733
  source 1..203: mol_type = other DNA

SEQ ID NO: 31495 - DNA, 203 bp, synthetic construct; identical to SEQ ID NO: 8734
  source 1..203: mol_type = other DNA

SEQ ID NO: 31496 - DNA, 203 bp, synthetic construct; identical to SEQ ID NO: 8735
  source 1..203: mol_type = other DNA

SEQ ID NO: 31497 - DNA, 203 bp, synthetic construct; identical to SEQ ID NO: 8736
  source 1..203: mol_type = other DNA

SEQ ID NO: 31498 - DNA, 203 bp, synthetic construct; identical to SEQ ID NO: 8737
  source 1..203: mol_type = other DNA

SEQ ID NO: 31499 - DNA, 203 bp, synthetic construct; identical to SEQ ID NO: 8738
  source 1..203: mol_type = other DNA

SEQ ID NO: 31500 - DNA, 203 bp, synthetic construct; identical to SEQ ID NO: 8739
  source 1..203: mol_type = other DNA

SEQ ID NO: 31501 - DNA, 203 bp, synthetic construct; identical to SEQ ID NO: 8740
  source 1..203: mol_type = other DNA

SEQ ID NO: 31502 - DNA, 203 bp, synthetic construct; identical to SEQ ID NO: 8741
  source 1..203: mol_type = other DNA

SEQ ID NO: 31503 - DNA, 203 bp, synthetic construct; identical to SEQ ID NO: 8742
  source 1..203: mol_type = other DNA

SEQ ID NO: 31504 - DNA, 203 bp, synthetic construct; identical to SEQ ID NO: 8743
  source 1..203: mol_type = other DNA

SEQ ID NO: 31505 - DNA, 203 bp, synthetic construct; identical to SEQ ID NO: 8744
  source 1..203: mol_type = other DNA

SEQ ID NO: 31506 - DNA, 203 bp, synthetic construct; identical to SEQ ID NO: 8745
  source 1..203: mol_type = other DNA

SEQ ID NO: 31507 - DNA, 203 bp, synthetic construct; identical to SEQ ID NO: 8746
  source 1..203: mol_type = other DNA

SEQ ID NO: 31508 - DNA, 203 bp, synthetic construct; identical to SEQ ID NO: 8756
  source 1..203: mol_type = other DNA

SEQ ID NO: 31509 - DNA, 203 bp, synthetic construct; identical to SEQ ID NO: 8757
  source 1..203: mol_type = other DNA

SEQ ID NO: 31510 - DNA, 203 bp, synthetic construct; identical to SEQ ID NO: 8764
  source 1..203: mol_type = other DNA

SEQ ID NO: 31511 - DNA, 203 bp, synthetic construct; identical to SEQ ID NO: 8766
  source 1..203: mol_type = other DNA

SEQ ID NO: 31512 - DNA, 203 bp, synthetic construct; identical to SEQ ID NO: 8775
  source 1..203: mol_type = other DNA

SEQ ID NO: 31513 - DNA, 203 bp, synthetic construct; identical to SEQ ID NO: 8777
  source 1..203: mol_type = other DNA

SEQ ID NO: 31514 - DNA, 203 bp, synthetic construct; identical to SEQ ID NO: 8786
  source 1..203: mol_type = other DNA

SEQ ID NO: 31515 - DNA, 203 bp, synthetic construct; identical to SEQ ID NO: 8788
  source 1..203: mol_type = other DNA

SEQ ID NO: 31516 - DNA, 203 bp, synthetic construct; identical to SEQ ID NO: 12
  source 1..203: mol_type = other DNA

SEQ ID NO: 31517 - DNA, 203 bp, synthetic construct; identical to SEQ ID NO: 13
  source 1..203: mol_type = other DNA

SEQ ID NO: 31518 - DNA, 203 bp, synthetic construct; identical to SEQ ID NO: 23
  source 1..203: mol_type = other DNA

SEQ ID NO: 31519 - DNA, 203 bp, synthetic construct; identical to SEQ ID NO: 29
  source 1..203: mol_type = other DNA

SEQ ID NO: 31520 - DNA, 203 bp, synthetic construct; identical to SEQ ID NO: 32
  source 1..203: mol_type = other DNA

SEQ ID NO: 31521 - DNA, 203 bp, synthetic construct; identical to SEQ ID NO: 35
  source 1..203: mol_type = other DNA

SEQ ID NO: 31522 - DNA, 203 bp, synthetic construct; identical to SEQ ID NO: 40
  source 1..203: mol_type = other DNA

SEQ ID NO: 31523 - DNA, 203 bp, synthetic construct; identical to SEQ ID NO: 44
  source 1..203: mol_type = other DNA

SEQ ID NO: 31524 - DNA, 203 bp, synthetic construct; identical to SEQ ID NO: 45
  source 1..203: mol_type = other DNA

SEQ ID NO: 31525 - DNA, 203 bp, synthetic construct; identical to SEQ ID NO: 54
  source 1..203: mol_type = other DNA

SEQ ID NO: 31526 - DNA, 203 bp, synthetic construct; identical to SEQ ID NO: 61
  source 1..203: mol_type = other DNA

SEQ ID NO: 31527 - DNA, 203 bp, synthetic construct; identical to SEQ ID NO: 62
  source 1..203: mol_type = other DNA

SEQ ID NO: 31528 - DNA, 203 bp, synthetic construct; identical to SEQ ID NO: 63
  source 1..203: mol_type = other DNA

SEQ ID NO: 31529 - DNA, 203 bp, synthetic construct; identical to SEQ ID NO: 65
  source 1..203: mol_type = other DNA

SEQ ID NO: 31530 - DNA, 203 bp, synthetic construct; identical to SEQ ID NO: 66
  source 1..203: mol_type = other DNA

SEQ ID NO: 31531 - DNA, 203 bp, synthetic construct; identical to SEQ ID NO: 67
  source 1..203: mol_type = other DNA

SEQ ID NO: 31532 - DNA, 203 bp, synthetic construct; identical to SEQ ID NO: 70
  source 1..203: mol_type = other DNA

SEQ ID NO: 31533 - DNA, 203 bp, synthetic construct; identical to SEQ ID NO: 72
  source 1..203: mol_type = other DNA

SEQ ID NO: 31534 - DNA, 203 bp, synthetic construct; identical to SEQ ID NO: 75
  source 1..203: mol_type = other DNA

SEQ ID NO: 31535 - DNA, 203 bp, synthetic construct; identical to SEQ ID NO: 77
  source 1..203: mol_type = other DNA

SEQ ID NO: 31536 - DNA, 203 bp, synthetic construct; identical to SEQ ID NO: 83
  source 1..203: mol_type = other DNA

SEQ ID NO: 31537 - DNA, 203 bp, synthetic construct; identical to SEQ ID NO: 84
  source 1..203: mol_type = other DNA

SEQ ID NO: 31538 - DNA, 203 bp, synthetic construct; identical to SEQ ID NO: 85
  source 1..203: mol_type = other DNA

SEQ ID NO: 31539 - DNA, 203 bp, synthetic construct; identical to SEQ ID NO: 87
  source 1..203: mol_type = other DNA

SEQ ID NO: 31540 - DNA, 203 bp, synthetic construct; identical to SEQ ID NO: 99
  source 1..203: mol_type = other DNA

SEQ ID NO: 31541 - DNA, 203 bp, synthetic construct; identical to SEQ ID NO: 109
  source 1..203: mol_type = other DNA

SEQ ID NO: 31542 - DNA, 203 bp, synthetic construct; identical to SEQ ID NO: 110
  source 1..203: mol_type = other DNA

SEQ ID NO: 31543 - DNA, 203 bp, synthetic construct; identical to SEQ ID NO: 111
  source 1..203: mol_type = other DNA

SEQ ID NO: 31544 - DNA, 203 bp, synthetic construct; identical to SEQ ID NO: 129
  source 1..203: mol_type = other DNA

SEQ ID NO: 31545 - DNA, 203 bp, synthetic construct; identical to SEQ ID NO: 139
  source 1..203: mol_type = other DNA

SEQ ID NO: 31546 - DNA, 203 bp, synthetic construct; identical to SEQ ID NO: 142
  source 1..203: mol_type = other DNA

SEQ ID NO: 31547 - DNA, 203 bp, synthetic construct; identical to SEQ ID NO: 151
  source 1..203: mol_type = other DNA

SEQ ID NO: 31548 - DNA, 203 bp, synthetic construct; identical to SEQ ID NO: 166
  source 1..203: mol_type = other DNA

SEQ ID NO: 31549 - DNA, 203 bp, synthetic construct; identical to SEQ ID NO: 175
  source 1..203: mol_type = other DNA

SEQ ID NO: 31550 - DNA, 203 bp, synthetic construct; identical to SEQ ID NO: 176
  source 1..203: mol_type = other DNA

SEQ ID NO: 31551 - DNA, 203 bp, synthetic construct; identical to SEQ ID NO: 177
  source 1..203: mol_type = other DNA

SEQ ID NO: 31552 - DNA, 203 bp, synthetic construct; identical to SEQ ID NO: 197
  source 1..203: mol_type = other DNA

SEQ ID NO: 31553 - DNA, 203 bp, synthetic construct; identical to SEQ ID NO: 201
  source 1..203: mol_type = other DNA

SEQ ID NO: 31554 - DNA, 203 bp, synthetic construct; identical to SEQ ID NO: 207
  source 1..203: mol_type = other DNA

SEQ ID NO: 31555 - DNA, 203 bp, synthetic construct; identical to SEQ ID NO: 8852
  source 1..203: mol_type = other DNA

SEQ ID NO: 31556 - DNA, 203 bp, synthetic construct; identical to SEQ ID NO: 8853
  source 1..203: mol_type = other DNA

SEQ ID NO: 31557 - DNA, 203 bp, synthetic construct; identical to SEQ ID NO: 8855
  source 1..203: mol_type = other DNA

SEQ ID NO: 31558 - DNA, 203 bp, synthetic construct; identical to SEQ ID NO: 8858
  source 1..203: mol_type = other DNA

SEQ ID NO: 31559 - DNA, 203 bp, synthetic construct; identical to SEQ ID NO: 8864
  source 1..203: mol_type = other DNA

SEQ ID NO: 31560 - DNA, 203 bp, synthetic construct; identical to SEQ ID NO: 8865
  source 1..203: mol_type = other DNA

SEQ ID NO: 31561 - DNA, 203 bp, synthetic construct; identical to SEQ ID NO: 8882
  source 1..203: mol_type = other DNA

SEQ ID NO: 31562 - DNA, 203 bp, synthetic construct; identical to SEQ ID NO: 8900
  source 1..203: mol_type = other DNA

SEQ ID NO: 31563 - DNA, 203 bp, synthetic construct; identical to SEQ ID NO: 8920
  source 1..203: mol_type = other DNA

SEQ ID NO: 31564 - DNA, 203 bp, synthetic construct; identical to SEQ ID NO: 8921
  source 1..203: mol_type = other DNA

SEQ ID NO: 31565 - DNA, 203 bp, synthetic construct; identical to SEQ ID NO: 8922
  source 1..203: mol_type = other DNA

SEQ ID NO: 31566 - DNA, 203 bp, synthetic construct; identical to SEQ ID NO: 8924
  source 1..203: mol_type = other DNA

SEQ ID NO: 31567 - DNA, 203 bp, synthetic construct; identical to SEQ ID NO: 8925
  source 1..203: mol_type = other DNA

SEQ ID NO: 31568 - DNA, 203 bp, synthetic construct; identical to SEQ ID NO: 8926
  source 1..203: mol_type = other DNA

SEQ ID NO: 31569 - DNA, 203 bp, synthetic construct; identical to SEQ ID NO: 8927
  source 1..203: mol_type = other DNA

SEQ ID NO: 31570 - DNA, 203 bp, synthetic construct; identical to SEQ ID NO: 8928
  source 1..203: mol_type = other DNA

SEQ ID NO: 31571 - DNA, 203 bp, synthetic construct; identical to SEQ ID NO: 8929
  source 1..203: mol_type = other DNA

SEQ ID NO: 31572 - DNA, 203 bp, synthetic construct; identical to SEQ ID NO: 8930
  source 1..203: mol_type = other DNA

SEQ ID NO: 31573 - DNA, 203 bp, synthetic construct; identical to SEQ ID NO: 8931
  source 1..203: mol_type = other DNA

SEQ ID NO: 31574 - DNA, 203 bp, synthetic construct; identical to SEQ ID NO: 8932
  source 1..203: mol_type = other DNA

SEQ ID NO: 31575 - DNA, 203 bp, synthetic construct; identical to SEQ ID NO: 8936
  source 1..203: mol_type = other DNA

SEQ ID NO: 31576 - DNA, 203 bp, synthetic construct; identical to SEQ ID NO: 8946
  source 1..203: mol_type = other DNA

SEQ ID NO: 31577 - DNA, 203 bp, synthetic construct; identical to SEQ ID NO: 8955
  source 1..203: mol_type = other DNA

SEQ ID NO: 31578 - DNA, 203 bp, synthetic construct; identical to SEQ ID NO: 8971
  source 1..203: mol_type = other DNA

SEQ ID NO: 31579 - DNA, 203 bp, synthetic construct; identical to SEQ ID NO: 8975
  source 1..203: mol_type = other DNA

SEQ ID NO: 31580 - DNA, 203 bp, synthetic construct; identical to SEQ ID NO: 8978
  source 1..203: mol_type = other DNA

SEQ ID NO: 31581 - DNA, 203 bp, synthetic construct; identical to SEQ ID NO: 8979
  source 1..203: mol_type = other DNA

SEQ ID NO: 31582 - DNA, 203 bp, synthetic construct; identical to SEQ ID NO: 8982
  source 1..203: mol_type = other DNA

SEQ ID NO: 31583 - DNA, 203 bp, synthetic construct; identical to SEQ ID NO: 8983
  source 1..203: mol_type = other DNA

SEQ ID NO: 31584 - DNA, 203 bp, synthetic construct; identical to SEQ ID NO: 8984
  source 1..203: mol_type = other DNA

SEQ ID NO: 31585 - DNA, 203 bp, synthetic construct; identical to SEQ ID NO: 8985
  source 1..203: mol_type = other DNA

SEQ ID NO: 31586 - DNA, 203 bp, synthetic construct; identical to SEQ ID NO: 8987
  source 1..203: mol_type = other DNA

SEQ ID NO: 31587 - DNA, 203 bp, synthetic construct; identical to SEQ ID NO: 8992
  source 1..203: mol_type = other DNA

SEQ ID NO: 31588 - DNA, 203 bp, synthetic construct; identical to SEQ ID NO: 8994
  source 1..203: mol_type = other DNA

SEQ ID NO: 31589 - DNA, 203 bp, synthetic construct; identical to SEQ ID NO: 8995
  source 1..203: mol_type = other DNA

SEQ ID NO: 31590 - DNA, 203 bp, synthetic construct; identical to SEQ ID NO: 8996
  source 1..203: mol_type = other DNA

SEQ ID NO: 31591 - DNA, 203 bp, synthetic construct; identical to SEQ ID NO: 8997
  source 1..203: mol_type = other DNA

SEQ ID NO: 31592 - DNA, 203 bp, synthetic construct; identical to SEQ ID NO: 8998
  source 1..203: mol_type = other DNA

SEQ ID NO: 31593 - DNA, 203 bp, synthetic construct; identical to SEQ ID NO: 8999
  source 1..203: mol_type = other DNA

SEQ ID NO: 31594 - DNA, 203 bp, synthetic construct; identical to SEQ ID NO: 9001
  source 1..203: mol_type = other DNA

SEQ ID NO: 31595 - DNA, 203 bp, synthetic construct; identical to SEQ ID NO: 9004
  source 1..203: mol_type = other DNA

SEQ ID NO: 31596 - DNA, 203 bp, synthetic construct; identical to SEQ ID NO: 9008
  source 1..203: mol_type = other DNA

SEQ ID NO: 31597 - DNA, 203 bp, synthetic construct; identical to SEQ ID NO: 9011
  source 1..203: mol_type = other DNA

SEQ ID NO: 31598 - DNA, 203 bp, synthetic construct; identical to SEQ ID NO: 9012
  source 1..203: mol_type = other DNA

SEQ ID NO: 31599 - DNA, 203 bp, synthetic construct; identical to SEQ ID NO: 9015
  source 1..203: mol_type = other DNA

SEQ ID NO: 31600 - DNA, 203 bp, synthetic construct; identical to SEQ ID NO: 9017
  source 1..203: mol_type = other DNA

SEQ ID NO: 31601 - DNA, 203 bp, synthetic construct; identical to SEQ ID NO: 9019
  source 1..203: mol_type = other DNA

SEQ ID NO: 31602 - DNA, 203 bp, synthetic construct; identical to SEQ ID NO: 9026
  source 1..203: mol_type = other DNA

SEQ ID NO: 31603 - DNA, 203 bp, synthetic construct; identical to SEQ ID NO: 9029
  source 1..203: mol_type = other DNA

SEQ ID NO: 31604 - DNA, 203 bp, synthetic construct; identical to SEQ ID NO: 9031
  source 1..203: mol_type = other DNA

SEQ ID NO: 31605 - DNA, 203 bp, synthetic construct; identical to SEQ ID NO: 9032
  source 1..203: mol_type = other DNA

SEQ ID NO: 31606 - DNA, 203 bp, synthetic construct; identical to SEQ ID NO: 9033
  source 1..203: mol_type = other DNA

SEQ ID NO: 31607 - DNA, 203 bp, synthetic construct; identical to SEQ ID NO: 9034
  source 1..203: mol_type = other DNA

SEQ ID NO: 31608 - DNA, 203 bp, synthetic construct; identical to SEQ ID NO: 9035
  source 1..203: mol_type = other DNA

SEQ ID NO: 31609 - DNA, 203 bp, synthetic construct; identical to SEQ ID NO: 9036
  source 1..203: mol_type = other DNA

SEQ ID NO: 31610 - DNA, 203 bp, synthetic construct; identical to SEQ ID NO: 9042
  source 1..203: mol_type = other DNA

SEQ ID NO: 31611 - DNA, 203 bp, synthetic construct; identical to SEQ ID NO: 9045
  source 1..203: mol_type = other DNA

SEQ ID NO: 31612 - DNA, 203 bp, synthetic construct; identical to SEQ ID NO: 9049
  source 1..203: mol_type = other DNA

SEQ ID NO: 31613 - DNA, 203 bp, synthetic construct; identical to SEQ ID NO: 9051
  source 1..203: mol_type = other DNA

SEQ ID NO: 31614 - DNA, 203 bp, synthetic construct; identical to SEQ ID NO: 9053
  source 1..203: mol_type = other DNA

SEQ ID NO: 31615 - DNA, 203 bp, synthetic construct; identical to SEQ ID NO: 9054
  source 1..203: mol_type = other DNA

SEQ ID NO: 31616 - DNA, 203 bp, synthetic construct; identical to SEQ ID NO: 9055
  source 1..203: mol_type = other DNA

SEQ ID NO: 31617 - DNA, 203 bp, synthetic construct; identical to SEQ ID NO: 9059
  source 1..203: mol_type = other DNA

SEQ ID NO: 31618 - DNA, 203 bp, synthetic construct; identical to SEQ ID NO: 9061
  source 1..203: mol_type = other DNA

SEQ ID NO: 31619 - DNA, 203 bp, synthetic construct; identical to SEQ ID NO: 9063
  source 1..203: mol_type = other DNA

SEQ ID NO: 31620 - DNA, 203 bp, synthetic construct; identical to SEQ ID NO: 9068
  source 1..203: mol_type = other DNA

SEQ ID NO: 31621 - DNA, 203 bp, synthetic construct; identical to SEQ ID NO: 9072
  source 1..203: mol_type = other DNA

SEQ ID NO: 31622 - DNA, 203 bp, synthetic construct; identical to SEQ ID NO: 9079
  source 1..203: mol_type = other DNA

SEQ ID NO: 31623 - DNA, 203 bp, synthetic construct; identical to SEQ ID NO: 9080
  source 1..203: mol_type = other DNA

SEQ ID NO: 31624 - DNA, 203 bp, synthetic construct; identical to SEQ ID NO: 9082
  source 1..203: mol_type = other DNA

SEQ ID NO: 31625 - DNA, 203 bp, synthetic construct; identical to SEQ ID NO: 9084
  source 1..203: mol_type = other DNA

SEQ ID NO: 31626 - DNA, 203 bp, synthetic construct; identical to SEQ ID NO: 9088
  source 1..203: mol_type = other DNA

SEQ ID NO: 31627 - DNA, 203 bp, synthetic construct; identical to SEQ ID NO: 9089
  source 1..203: mol_type = other DNA

SEQ ID NO: 31628 - DNA, 203 bp, synthetic construct; identical to SEQ ID NO: 9092
  source 1..203: mol_type = other DNA

SEQ ID NO: 31629 - DNA, 203 bp, synthetic construct; identical to SEQ ID NO: 9095
  source 1..203: mol_type = other DNA

SEQ ID NO: 31630 - DNA, 203 bp, synthetic construct; identical to SEQ ID NO: 9096
  source 1..203: mol_type = other DNA

SEQ ID NO: 31631 - DNA, 203 bp, synthetic construct; identical to SEQ ID NO: 9103
  source 1..203: mol_type = other DNA

SEQ ID NO: 31632 - DNA, 203 bp, synthetic construct; identical to SEQ ID NO: 9104
  source 1..203: mol_type = other DNA

SEQ ID NO: 31633 - DNA, 203 bp, synthetic construct; identical to SEQ ID NO: 9109
  source 1..203: mol_type = other DNA

SEQ ID NO: 31634 - DNA, 203 bp, synthetic construct; identical to SEQ ID NO: 9111
  source 1..203: mol_type = other DNA

SEQ ID NO: 31635 - DNA, 203 bp, synthetic construct; identical to SEQ ID NO: 9112
  source 1..203: mol_type = other DNA

SEQ ID NO: 31636 - DNA, 203 bp, synthetic construct; identical to SEQ ID NO: 9113
  source 1..203: mol_type = other DNA

SEQ ID NO: 31637 - DNA, 203 bp, synthetic construct; identical to SEQ ID NO: 9116
  source 1..203: mol_type = other DNA

SEQ ID NO: 31638 - DNA, 203 bp, synthetic construct; identical to SEQ ID NO: 9117
  source 1..203: mol_type = other DNA

SEQ ID NO: 31639 - DNA, 203 bp, synthetic construct; identical to SEQ ID NO: 9119
  source 1..203: mol_type = other DNA

SEQ ID NO: 31640 - DNA, 203 bp, synthetic construct; identical to SEQ ID NO: 9122
  source 1..203: mol_type = other DNA

SEQ ID NO: 31641 - DNA, 203 bp, synthetic construct; identical to SEQ ID NO: 9127
  source 1..203: mol_type = other DNA

SEQ ID NO: 31642 - DNA, 203 bp, synthetic construct; identical to SEQ ID NO: 9132
  source 1..203: mol_type = other DNA

SEQ ID NO: 31643 - DNA, 203 bp, synthetic construct; identical to SEQ ID NO: 9134
  source 1..203: mol_type = other DNA

SEQ ID NO: 31644 - DNA, 203 bp, synthetic construct; identical to SEQ ID NO: 9136
  source 1..203: mol_type = other DNA

SEQ ID NO: 31645 - DNA, 203 bp, synthetic construct; identical to SEQ ID NO: 9139
  source 1..203: mol_type = other DNA

SEQ ID NO: 31646 - DNA, 203 bp, synthetic construct; identical to SEQ ID NO: 9142
  source 1..203: mol_type = other DNA

SEQ ID NO: 31647 - DNA, 203 bp, synthetic construct; identical to SEQ ID NO: 9149
  source 1..203: mol_type = other DNA

SEQ ID NO: 31648 - DNA, 203 bp, synthetic construct; identical to SEQ ID NO: 9155
  source 1..203: mol_type = other DNA

SEQ ID NO: 31649 - DNA, 203 bp, synthetic construct; identical to SEQ ID NO: 9156
  source 1..203: mol_type = other DNA

SEQ ID NO: 31650 - DNA, 203 bp, synthetic construct; identical to SEQ ID NO: 9157
  source 1..203: mol_type = other DNA

SEQ ID NO: 31651 - DNA, 203 bp, synthetic construct; identical to SEQ ID NO: 9168
  source 1..203: mol_type = other DNA

SEQ ID NO: 31652 - DNA, 203 bp, synthetic construct; identical to SEQ ID NO: 9174
  source 1..203: mol_type = other DNA

SEQ ID NO: 31653 - DNA, 203 bp, synthetic construct; identical to SEQ ID NO: 9176
  source 1..203: mol_type = other DNA

SEQ ID NO: 31654 - DNA, 203 bp, synthetic construct; identical to SEQ ID NO: 9177
  source 1..203: mol_type = other DNA

SEQ ID NO: 31655 - DNA, 203 bp, synthetic construct; identical to SEQ ID NO: 9178
  source 1..203: mol_type = other DNA

SEQ ID NO: 31656 - DNA, 203 bp, synthetic construct; identical to SEQ ID NO: 9181
  source 1..203: mol_type = other DNA

SEQ ID NO: 31657 - DNA, 203 bp, synthetic construct; identical to SEQ ID NO: 9182
  source 1..203: mol_type = other DNA

SEQ ID NO: 31658 - DNA, 203 bp, synthetic construct; identical to SEQ ID NO: 9185
  source 1..203: mol_type = other DNA

SEQ ID NO: 31659 - DNA, 203 bp, synthetic construct; identical to SEQ ID NO: 9186
  source 1..203: mol_type = other DNA

SEQ ID NO: 31660 - DNA, 203 bp, synthetic construct; identical to SEQ ID NO: 9188
  source 1..203: mol_type = other DNA

SEQ ID NO: 31661 - DNA, 203 bp, synthetic construct; identical to SEQ ID NO: 9190
  source 1..203: mol_type = other DNA

SEQ ID NO: 31662 - DNA, 203 bp, synthetic construct; identical to SEQ ID NO: 9191
  source 1..203: mol_type = other DNA

SEQ ID NO: 31663 - DNA, 203 bp, synthetic construct; identical to SEQ ID NO: 9195
  source 1..203: mol_type = other DNA

SEQ ID NO: 31664 - DNA, 203 bp, synthetic construct; identical to SEQ ID NO: 9198
  source 1..203: mol_type = other DNA

SEQ ID NO: 31665 - DNA, 203 bp, synthetic construct; identical to SEQ ID NO: 9211
  source 1..203: mol_type = other DNA

SEQ ID NO: 31666 - DNA, 203 bp, synthetic construct; identical to SEQ ID NO: 9221
  source 1..203: mol_type = other DNA

SEQ ID NO: 31667 - DNA, 203 bp, synthetic construct; identical to SEQ ID NO: 9225
  source 1..203: mol_type = other DNA

SEQ ID NO: 31668 - DNA, 203 bp, synthetic construct; identical to SEQ ID NO: 9229
  source 1..203: mol_type = other DNA

SEQ ID NO: 31669 - DNA, 203 bp, synthetic construct; identical to SEQ ID NO: 9232
  source 1..203: mol_type = other DNA

SEQ ID NO: 31670 - DNA, 203 bp, synthetic construct; identical to SEQ ID NO: 9235
  source 1..203: mol_type = other DNA

SEQ ID NO: 31671 - DNA, 203 bp, synthetic construct; identical to SEQ ID NO: 9242
  source 1..203: mol_type = other DNA

SEQ ID NO: 31672 - DNA, 203 bp, synthetic construct; identical to SEQ ID NO: 9244
  source 1..203: mol_type = other DNA

SEQ ID NO: 31673 - DNA, 203 bp, synthetic construct; identical to SEQ ID NO: 9246
  source 1..203: mol_type = other DNA

SEQ ID NO: 31674 - DNA, 203 bp, synthetic construct; identical to SEQ ID NO: 9252
  source 1..203: mol_type = other DNA

SEQ ID NO: 31675 - DNA, 203 bp, synthetic construct; identical to SEQ ID NO: 9254
  source 1..203: mol_type = other DNA

SEQ ID NO: 31676 - DNA, 203 bp, synthetic construct; identical to SEQ ID NO: 9255
  source 1..203: mol_type = other DNA

SEQ ID NO: 31677 - DNA, 203 bp, synthetic construct; identical to SEQ ID NO: 9257
  source 1..203: mol_type = other DNA

SEQ ID NO: 31678 - DNA, 203 bp, synthetic construct; identical to SEQ ID NO: 9259
  source 1..203: mol_type = other DNA

SEQ ID NO: 31679 - DNA, 203 bp, synthetic construct; identical to SEQ ID NO: 9262
  source 1..203: mol_type = other DNA

SEQ ID NO: 31680 - DNA, 203 bp, synthetic construct; identical to SEQ ID NO: 9264
  source 1..203: mol_type = other DNA

SEQ ID NO: 31681 - DNA, 203 bp, synthetic construct; identical to SEQ ID NO: 9265
  source 1..203: mol_type = other DNA

SEQ ID NO: 31682 - DNA, 203 bp, synthetic construct; identical to SEQ ID NO: 9266
  source 1..203: mol_type = other DNA

SEQ ID NO: 31683 - DNA, 203 bp, synthetic construct; identical to SEQ ID NO: 9271
  source 1..203: mol_type = other DNA

SEQ ID NO: 31684 - DNA, 203 bp, synthetic construct; identical to SEQ ID NO: 9272
  source 1..203: mol_type = other DNA

SEQ ID NO: 31685 - DNA, 203 bp, synthetic construct; identical to SEQ ID NO: 9274
  source 1..203: mol_type = other DNA

SEQ ID NO: 31686 - DNA, 203 bp, synthetic construct; identical to SEQ ID NO: 9276
  source 1..203: mol_type = other DNA

SEQ ID NO: 31687 - DNA, 203 bp, synthetic construct; identical to SEQ ID NO: 9283
  source 1..203: mol_type = other DNA

SEQ ID NO: 31688 - DNA, 203 bp, synthetic construct; identical to SEQ ID NO: 9284
  source 1..203: mol_type = other DNA

SEQ ID NO: 31689 - DNA, 203 bp, synthetic construct; identical to SEQ ID NO: 9288
  source 1..203: mol_type = other DNA

SEQ ID NO: 31690 - DNA, 203 bp, synthetic construct; identical to SEQ ID NO: 9289
  source 1..203: mol_type = other DNA

SEQ ID NO: 31691 - DNA, 203 bp, synthetic construct; identical to SEQ ID NO: 9291
  source 1..203: mol_type = other DNA

SEQ ID NO: 31692 - DNA, 203 bp, synthetic construct; identical to SEQ ID NO: 9294
  source 1..203: mol_type = other DNA

SEQ ID NO: 31693 - DNA, 203 bp, synthetic construct; identical to SEQ ID NO: 9296
  source 1..203: mol_type = other DNA

SEQ ID NO: 31694 - DNA, 203 bp, synthetic construct; identical to SEQ ID NO: 9298
  source 1..203: mol_type = other DNA

SEQ ID NO: 31695 - DNA, 203 bp, synthetic construct; identical to SEQ ID NO: 9300
  source 1..203: mol_type = other DNA

SEQ ID NO: 31696 - DNA, 203 bp, synthetic construct; identical to SEQ ID NO: 9302
  source 1..203: mol_type = other DNA

SEQ ID NO: 31697 - DNA, 203 bp, synthetic construct; identical to SEQ ID NO: 9306
  source 1..203: mol_type = other DNA

SEQ ID NO: 31698 - DNA, 203 bp, synthetic construct; identical to SEQ ID NO: 9308
  source 1..203: mol_type = other DNA

SEQ ID NO: 31699 - DNA, 203 bp, synthetic construct; identical to SEQ ID NO: 9309
  source 1..203: mol_type = other DNA

SEQ ID NO: 31700 - DNA, 203 bp, synthetic construct; identical to SEQ ID NO: 9313
  source 1..203: mol_type = other DNA

SEQ ID NO: 31701 - DNA, 203 bp, synthetic construct; identical to SEQ ID NO: 9319
  source 1..203: mol_type = other DNA

SEQ ID NO: 31702 - DNA, 203 bp, synthetic construct; identical to SEQ ID NO: 9320
  source 1..203: mol_type = other DNA

SEQ ID NO: 31703 - DNA, 203 bp, synthetic construct; identical to SEQ ID NO: 9322
  source 1..203: mol_type = other DNA

SEQ ID NO: 31704 - DNA, 203 bp, synthetic construct; identical to SEQ ID NO: 9324
  source 1..203: mol_type = other DNA

SEQ ID NO: 31705 - DNA, 203 bp, synthetic construct; identical to SEQ ID NO: 9335
  source 1..203: mol_type = other DNA

SEQ ID NO: 31706 - DNA, 203 bp, synthetic construct; identical to SEQ ID NO: 9343
  source 1..203: mol_type = other DNA

SEQ ID NO: 31707 - DNA, 203 bp, synthetic construct; identical to SEQ ID NO: 9347
  source 1..203: mol_type = other DNA

SEQ ID NO: 31708 - DNA, 203 bp, synthetic construct; identical to SEQ ID NO: 9348
  source 1..203: mol_type = other DNA

SEQ ID NO: 31709 - DNA, 203 bp, synthetic construct; identical to SEQ ID NO: 9353
  source 1..203: mol_type = other DNA

SEQ ID NO: 31710 - DNA, 203 bp, synthetic construct; identical to SEQ ID NO: 9354
  source 1..203: mol_type = other DNA

SEQ ID NO: 31711 - DNA, 203 bp, synthetic construct; identical to SEQ ID NO: 9358
  source 1..203: mol_type = other DNA

SEQ ID NO: 31712 - DNA, 203 bp, synthetic construct; identical to SEQ ID NO: 9373
  source 1..203: mol_type = other DNA

SEQ ID NO: 31713 - DNA, 203 bp, synthetic construct; identical to SEQ ID NO: 9377
  source 1..203: mol_type = other DNA

SEQ ID NO: 31714 - DNA, 203 bp, synthetic construct; identical to SEQ ID NO: 9378
  source 1..203: mol_type = other DNA

SEQ ID NO: 31715 - DNA, 203 bp, synthetic construct; identical to SEQ ID NO: 9379
  source 1..203: mol_type = other DNA

SEQ ID NO: 31716 - DNA, 203 bp, synthetic construct; identical to SEQ ID NO: 9380
  source 1..203: mol_type = other DNA

SEQ ID NO: 31717 - DNA, 203 bp, synthetic construct; identical to SEQ ID NO: 9381
  source 1..203: mol_type = other DNA

SEQ ID NO: 31718 - DNA, 203 bp, synthetic construct; identical to SEQ ID NO: 9384
  source 1..203: mol_type = other DNA

SEQ ID NO: 31719 - DNA, 203 bp, synthetic construct; identical to SEQ ID NO: 9391
  source 1..203: mol_type = other DNA

SEQ ID NO: 31720 - DNA, 203 bp, synthetic construct; identical to SEQ ID NO: 9392
  source 1..203: mol_type = other DNA

SEQ ID NO: 31721 - DNA, 203 bp, synthetic construct; identical to SEQ ID NO: 9397
  source 1..203: mol_type = other DNA

SEQ ID NO: 31722 - DNA, 203 bp, synthetic construct; identical to SEQ ID NO: 9398
  source 1..203: mol_type = other DNA

SEQ ID NO: 31723 - DNA, 203 bp, synthetic construct; identical to SEQ ID NO: 9400
  source 1..203: mol_type = other DNA

SEQ ID NO: 31724 - DNA, 203 bp, synthetic construct; identical to SEQ ID NO: 9404
  source 1..203: mol_type = other DNA

SEQ ID NO: 31725 - DNA, 203 bp, synthetic construct; identical to SEQ ID NO: 9406
  source 1..203: mol_type = other DNA

SEQ ID NO: 31726 - DNA, 203 bp, synthetic construct; identical to SEQ ID NO: 9416
  source 1..203: mol_type = other DNA

SEQ ID NO: 31727 - DNA, 203 bp, synthetic construct; identical to SEQ ID NO: 9423
  source 1..203: mol_type = other DNA

SEQ ID NO: 31728 - DNA, 203 bp, synthetic construct; identical to SEQ ID NO: 9425
  source 1..203: mol_type = other DNA

SEQ ID NO: 31729 - DNA, 203 bp, synthetic construct; identical to SEQ ID NO: 9442
  source 1..203: mol_type = other DNA

SEQ ID NO: 31730 - DNA, 203 bp, synthetic construct; identical to SEQ ID NO: 9444
  source 1..203: mol_type = other DNA

SEQ ID NO: 31731 - DNA, 203 bp, synthetic construct; identical to SEQ ID NO: 9445
  source 1..203: mol_type = other DNA

SEQ ID NO: 31732 - DNA, 203 bp, synthetic construct; identical to SEQ ID NO: 9501
  source 1..203: mol_type = other DNA

SEQ ID NO: 31733 - DNA, 203 bp, synthetic construct; identical to SEQ ID NO: 9502
  source 1..203: mol_type = other DNA

SEQ ID NO: 31734 - DNA, 203 bp, synthetic construct; identical to SEQ ID NO: 9503
  source 1..203: mol_type = other DNA

SEQ ID NO: 31735 - DNA, 203 bp, synthetic construct; identical to SEQ ID NO: 9504
  source 1..203: mol_type = other DNA

SEQ ID NO: 31736 - DNA, 203 bp, synthetic construct; identical to SEQ ID NO: 9510
  source 1..203: mol_type = other DNA

SEQ ID NO: 31737 - DNA, 203 bp, synthetic construct; identical to SEQ ID NO: 9511
  source 1..203: mol_type = other DNA

SEQ ID NO: 31738 - DNA, 203 bp, synthetic construct; identical to SEQ ID NO: 9512
  source 1..203: mol_type = other DNA

SEQ ID NO: 31739 - DNA, 203 bp, synthetic construct; identical to SEQ ID NO: 9522
  source 1..203: mol_type = other DNA

SEQ ID NO: 31740 - DNA, 203 bp, synthetic construct; identical to SEQ ID NO: 9536
  source 1..203: mol_type = other DNA

SEQ ID NO: 31741 - DNA, 203 bp, synthetic construct; identical to SEQ ID NO: 9537
  source 1..203: mol_type = other DNA

SEQ ID NO: 31742 - DNA, 203 bp, synthetic construct; identical to SEQ ID NO: 9538
  source 1..203: mol_type = other DNA

SEQ ID NO: 31743 - DNA, 203 bp, synthetic construct; identical to SEQ ID NO: 9539
  source 1..203: mol_type = other DNA

SEQ ID NO: 31744 - DNA, 203 bp, synthetic construct; identical to SEQ ID NO: 9550
  source 1..203: mol_type = other DNA

SEQ ID NO: 31745 - DNA, 203 bp, synthetic construct; identical to SEQ ID NO: 9551
  source 1..203: mol_type = other DNA

SEQ ID NO: 31746 - DNA, 203 bp, synthetic construct; identical to SEQ ID NO: 9552
  source 1..203: mol_type = other DNA

SEQ ID NO: 31747 - DNA, 203 bp, synthetic construct; identical to SEQ ID NO: 9569
  source 1..203: mol_type = other DNA

SEQ ID NO: 31748 - DNA, 203 bp, synthetic construct; identical to SEQ ID NO: 9570
  source 1..203: mol_type = other DNA

SEQ ID NO: 31749 - DNA, 203 bp, synthetic construct; identical to SEQ ID NO: 9571
  source 1..203: mol_type = other DNA

SEQ ID NO: 31750 - DNA, 203 bp, synthetic construct; identical to SEQ ID NO: 9572
  source 1..203: mol_type = other DNA

SEQ ID NO: 31751 - DNA, 203 bp, synthetic construct; identical to SEQ ID NO: 9573
  source 1..203: mol_type = other DNA

SEQ ID NO: 31752 - DNA, 203 bp, synthetic construct; identical to SEQ ID NO: 9574
  source 1..203: mol_type = other DNA

SEQ ID NO: 31753 - DNA, 203 bp, synthetic construct; identical to SEQ ID NO: 9575
  source 1..203: mol_type = other DNA

SEQ ID NO: 31754 - DNA, 203 bp, synthetic construct; identical to SEQ ID NO: 9576
  source 1..203: mol_type = other DNA

SEQ ID NO: 31755 - DNA, 203 bp, synthetic construct; identical to SEQ ID NO: 9577
  source 1..203: mol_type = other DNA

SEQ ID NO: 31756 - DNA, 203 bp, synthetic construct; identical to SEQ ID NO: 9578
  source 1..203: mol_type = other DNA

SEQ ID NO: 31757 - DNA, 203 bp, synthetic construct; identical to SEQ ID NO: 9579
  source 1..203: mol_type = other DNA

SEQ ID NO: 31758 - DNA, 203 bp, synthetic construct; identical to SEQ ID NO: 9581
  source 1..203: mol_type = other DNA

SEQ ID NO: 31759 - DNA, 203 bp, synthetic construct; identical to SEQ ID NO: 9582
  source 1..203: mol_type = other DNA

SEQ ID NO: 31760 - DNA, 203 bp, synthetic construct; identical to SEQ ID NO: 9583
  source 1..203: mol_type = other DNA

SEQ ID NO: 31761 - DNA, 203 bp, synthetic construct; identical to SEQ ID NO: 9584
  source 1..203: mol_type = other DNA

SEQ ID NO: 31762 - DNA, 203 bp, synthetic construct; identical to SEQ ID NO: 9585
  source 1..203: mol_type = other DNA

SEQ ID NO: 31763 - DNA, 203 bp, synthetic construct; identical to SEQ ID NO: 9586
  source 1..203: mol_type = other DNA

SEQ ID NO: 31764 - DNA, 203 bp, synthetic construct; identical to SEQ ID NO: 9587
  source 1..203: mol_type = other DNA

SEQ ID NO: 31765 - DNA, 203 bp, synthetic construct; identical to SEQ ID NO: 9588
  source 1..203: mol_type = other DNA

SEQ ID NO: 31766 - DNA, 203 bp, synthetic construct; identical to SEQ ID NO: 9600
  source 1..203: mol_type = other DNA

SEQ ID NO: 31767 - DNA, 203 bp, synthetic construct; identical to SEQ ID NO: 9601
  source 1..203: mol_type = other DNA

SEQ ID NO: 31768 - DNA, 203 bp, synthetic construct; identical to SEQ ID NO: 9607
  source 1..203: mol_type = other DNA

SEQ ID NO: 31769 - DNA, 203 bp, synthetic construct; identical to SEQ ID NO: 9608
  source 1..203: mol_type = other DNA

SEQ ID NO: 31770 - DNA, 203 bp, synthetic construct; identical to SEQ ID NO: 9609
  source 1..203: mol_type = other DNA

SEQ ID NO: 31771 - DNA, 203 bp, synthetic construct; identical to SEQ ID NO: 9610
  source 1..203: mol_type = other DNA

SEQ ID NO: 31772 - DNA, 203 bp, synthetic construct; identical to SEQ ID NO: 9611
  source 1..203: mol_type = other DNA

SEQ ID NO: 31773 - DNA, 203 bp, synthetic construct; identical to SEQ ID NO: 9616
  source 1..203: mol_type = other DNA

SEQ ID NO: 31774 - DNA, 203 bp, synthetic construct; identical to SEQ ID NO: 9622
  source 1..203: mol_type = other DNA

SEQ ID NO: 31775 - DNA, 203 bp, synthetic construct; identical to SEQ ID NO: 9629
  source 1..203: mol_type = other DNA

SEQ ID NO: 31776 - DNA, 203 bp, synthetic construct; identical to SEQ ID NO: 9632
  source 1..203: mol_type = other DNA

SEQ ID NO: 31777 - DNA, 203 bp, synthetic construct; identical to SEQ ID NO: 9636
  source 1..203: mol_type = other DNA

SEQ ID NO: 31778 - DNA, 203 bp, synthetic construct; identical to SEQ ID NO: 9637
  source 1..203: mol_type = other DNA

SEQ ID NO: 31779 - DNA, 203 bp, synthetic construct; identical to SEQ ID NO: 9639
  source 1..203: mol_type = other DNA

SEQ ID NO: 31780 - DNA, 203 bp, synthetic construct; identical to SEQ ID NO: 9641
  source 1..203: mol_type = other DNA

SEQ ID NO: 31781 - DNA, 203 bp, synthetic construct; identical to SEQ ID NO: 9642
  source 1..203: mol_type = other DNA

SEQ ID NO: 31782 - DNA, 203 bp, synthetic construct; identical to SEQ ID NO: 9647
  source 1..203: mol_type = other DNA

SEQ ID NO: 31783 - DNA, 203 bp, synthetic construct; identical to SEQ ID NO: 9649
  source 1..203: mol_type = other DNA

SEQ ID NO: 31784 - DNA, 203 bp, synthetic construct; identical to SEQ ID NO: 9655
  source 1..203: mol_type = other DNA

SEQ ID NO: 31785 - DNA, 203 bp, synthetic construct; identical to SEQ ID NO: 9657
  source 1..203: mol_type = other DNA

SEQ ID NO: 31786 - DNA, 203 bp, synthetic construct; identical to SEQ ID NO: 9658
  source 1..203: mol_type = other DNA

SEQ ID NO: 31787 - DNA, 203 bp, synthetic construct; identical to SEQ ID NO: 9664
  source 1..203: mol_type = other DNA

SEQ ID NO: 31788 - DNA, 203 bp, synthetic construct; identical to SEQ ID NO: 9665
  source 1..203: mol_type = other DNA

SEQ ID NO: 31789 - DNA, 203 bp, synthetic construct; identical to SEQ ID NO: 9671
  source 1..203: mol_type = other DNA

SEQ ID NO: 31790 - DNA, 203 bp, synthetic construct; identical to SEQ ID NO: 9678
  source 1..203: mol_type = other DNA

SEQ ID NO: 31791 - DNA, 203 bp, synthetic construct; identical to SEQ ID NO: 9682
  source 1..203: mol_type = other DNA

SEQ ID NO: 31792 - DNA, 203 bp, synthetic construct; identical to SEQ ID NO: 9683
  source 1..203: mol_type = other DNA

SEQ ID NO: 31793 - DNA, 203 bp, synthetic construct; identical to SEQ ID NO: 9685
  source 1..203: mol_type = other DNA

SEQ ID NO: 31794 - DNA, 203 bp, synthetic construct; identical to SEQ ID NO: 9687
  source 1..203: mol_type = other DNA

SEQ ID NO: 31795 - DNA, 203 bp, synthetic construct; identical to SEQ ID NO: 9689
  source 1..203: mol_type = other DNA

SEQ ID NO: 31796 - DNA, 203 bp, synthetic construct; identical to SEQ ID NO: 9692
  source 1..203: mol_type = other DNA

SEQ ID NO: 31797 - DNA, 203 bp, synthetic construct; identical to SEQ ID NO: 9695
  source 1..203: mol_type = other DNA

SEQ ID NO: 31798 - DNA, 203 bp, synthetic construct; identical to SEQ ID NO: 9697
  source 1..203: mol_type = other DNA

SEQ ID NO: 31799 - DNA, 203 bp, synthetic construct; identical to SEQ ID NO: 9700
  source 1..203: mol_type = other DNA

SEQ ID NO: 31800 - DNA, 203 bp, synthetic construct; identical to SEQ ID NO: 9707
  source 1..203: mol_type = other DNA

SEQ ID NO: 31801 - DNA, 203 bp, synthetic construct; identical to SEQ ID NO: 9708
  source 1..203: mol_type = other DNA

SEQ ID NO: 31802 - DNA, 203 bp, synthetic construct; identical to SEQ ID NO: 9709
  source 1..203: mol_type = other DNA

SEQ ID NO: 31803 - DNA, 203 bp, synthetic construct; identical to SEQ ID NO: 9713
  source 1..203: mol_type = other DNA

SEQ ID NO: 31804 - DNA, 203 bp, synthetic construct; identical to SEQ ID NO: 9718
  source 1..203: mol_type = other DNA

SEQ ID NO: 31805 - DNA, 203 bp, synthetic construct; identical to SEQ ID NO: 9719
  source 1..203: mol_type = other DNA

SEQ ID NO: 31806 - DNA, 203 bp, synthetic construct; identical to SEQ ID NO: 9720
  source 1..203: mol_type = other DNA

SEQ ID NO: 31807 - DNA, 203 bp, synthetic construct; identical to SEQ ID NO: 9722
  source 1..203: mol_type = other DNA

SEQ ID NO: 31808 - DNA, 203 bp, synthetic construct; identical to SEQ ID NO: 9726
  source 1..203: mol_type = other DNA

SEQ ID NO: 31809 - DNA, 203 bp, synthetic construct; identical to SEQ ID NO: 9728
  source 1..203: mol_type = other DNA

SEQ ID NO: 31810 - DNA, 203 bp, synthetic construct; identical to SEQ ID NO: 9730
  source 1..203: mol_type = other DNA

SEQ ID NO: 31811 - DNA, 203 bp, synthetic construct; identical to SEQ ID NO: 9734
  source 1..203: mol_type = other DNA

SEQ ID NO: 31812 - DNA, 203 bp, synthetic construct; identical to SEQ ID NO: 9741
  source 1..203: mol_type = other DNA

SEQ ID NO: 31813 - DNA, 203 bp, synthetic construct; identical to SEQ ID NO: 9742
  source 1..203: mol_type = other DNA

SEQ ID NO: 31814 - DNA, 203 bp, synthetic construct; identical to SEQ ID NO: 9744
  source 1..203: mol_type = other DNA

SEQ ID NO: 31815 - DNA, 203 bp, synthetic construct; identical to SEQ ID NO: 9751
  source 1..203: mol_type = other DNA

SEQ ID NO: 31816 - DNA, 203 bp, synthetic construct; identical to SEQ ID NO: 9759
  source 1..203: mol_type = other DNA

SEQ ID NO: 31817 - DNA, 203 bp, synthetic construct; identical to SEQ ID NO: 9760
  source 1..203: mol_type = other DNA

SEQ ID NO: 31818 - DNA, 203 bp, synthetic construct; identical to SEQ ID NO: 9766
  source 1..203: mol_type = other DNA

SEQ ID NO: 31819 - DNA, 203 bp, synthetic construct; identical to SEQ ID NO: 9770
  source 1..203: mol_type = other DNA

SEQ ID NO: 31820 - DNA, 203 bp, synthetic construct; identical to SEQ ID NO: 9789
  source 1..203: mol_type = other DNA

SEQ ID NO: 31821 - DNA, 203 bp, synthetic construct; identical to SEQ ID NO: 9792
  source 1..203: mol_type = other DNA

SEQ ID NO: 31822 - DNA, 203 bp, synthetic construct; identical to SEQ ID NO: 9794
  source 1..203: mol_type = other DNA

SEQ ID NO: 31823 - DNA, 203 bp, synthetic construct; identical to SEQ ID NO: 9796
  source 1..203: mol_type = other DNA

SEQ ID NO: 31824 - DNA, 203 bp, synthetic construct; identical to SEQ ID NO: 9805
  source 1..203: mol_type = other DNA

SEQ ID NO: 31825 - DNA, 203 bp, synthetic construct; identical to SEQ ID NO: 9812
  source 1..203: mol_type = other DNA

SEQ ID NO: 31826 - DNA, 203 bp, synthetic construct; identical to SEQ ID NO: 9814
  source 1..203: mol_type = other DNA

SEQ ID NO: 31827 - DNA, 203 bp, synthetic construct; identical to SEQ ID NO: 9816
  source 1..203: mol_type = other DNA

SEQ ID NO: 31828 - DNA, 203 bp, synthetic construct; identical to SEQ ID NO: 9818
  source 1..203: mol_type = other DNA

SEQ ID NO: 31829 - DNA, 203 bp, synthetic construct; identical to SEQ ID NO: 9820
  source 1..203: mol_type = other DNA

SEQ ID NO: 31830 - DNA, 203 bp, synthetic construct; identical to SEQ ID NO: 9821
  source 1..203: mol_type = other DNA

SEQ ID NO: 31831 - DNA, 203 bp, synthetic construct; identical to SEQ ID NO: 9832
  source 1..203: mol_type = other DNA

SEQ ID NO: 31832 - DNA, 203 bp, synthetic construct; identical to SEQ ID NO: 9833
  source 1..203: mol_type = other DNA

SEQ ID NO: 31833 - DNA, 203 bp, synthetic construct; identical to SEQ ID NO: 9834
  source 1..203: mol_type = other DNA

SEQ ID NO: 31834 - DNA, 203 bp, synthetic construct; identical to SEQ ID NO: 9836
  source 1..203: mol_type = other DNA

SEQ ID NO: 31835 - DNA, 203 bp, synthetic construct; identical to SEQ ID NO: 9841
  source 1..203: mol_type = other DNA

SEQ ID NO: 31836 - DNA, 203 bp, synthetic construct; identical to SEQ ID NO: 9844
  source 1..203: mol_type = other DNA

SEQ ID NO: 31837 - DNA, 203 bp, synthetic construct; identical to SEQ ID NO: 9846
  source 1..203: mol_type = other DNA

SEQ ID NO: 31838 - DNA, 203 bp, synthetic construct; identical to SEQ ID NO: 9850
  source 1..203: mol_type = other DNA

SEQ ID NO: 31839 - DNA, 203 bp, synthetic construct; identical to SEQ ID NO: 9859
  source 1..203: mol_type = other DNA

SEQ ID NO: 31840 - DNA, 203 bp, synthetic construct; identical to SEQ ID NO: 9860
  source 1..203: mol_type = other DNA

SEQ ID NO: 31841 - DNA, 203 bp, synthetic construct; identical to SEQ ID NO: 9861
  source 1..203: mol_type = other DNA

SEQ ID NO: 31842 - DNA, 203 bp, synthetic construct; identical to SEQ ID NO: 9863
  source 1..203: mol_type = other DNA

SEQ ID NO: 31843 - DNA, 203 bp, synthetic construct; identical to SEQ ID NO: 9865
  source 1..203: mol_type = other DNA

SEQ ID NO: 31844 - DNA, 203 bp, synthetic construct; identical to SEQ ID NO: 9866
  source 1..203: mol_type = other DNA

SEQ ID NO: 31845 - DNA, 203 bp, synthetic construct; identical to SEQ ID NO: 9869
  source 1..203: mol_type = other DNA

SEQ ID NO: 31846 - DNA, 203 bp, synthetic construct; identical to SEQ ID NO: 9870
  source 1..203: mol_type = other DNA

SEQ ID NO: 31847 - DNA, 203 bp, synthetic construct; identical to SEQ ID NO: 9877
  source 1..203: mol_type = other DNA

SEQ ID NO: 31848 - DNA, 203 bp, synthetic construct; identical to SEQ ID NO: 9879
  source 1..203: mol_type = other DNA

SEQ ID NO: 31849 - DNA, 203 bp, synthetic construct; identical to SEQ ID NO: 9886
  source 1..203: mol_type = other DNA

SEQ ID NO: 31850 - DNA, 203 bp, synthetic construct; identical to SEQ ID NO: 9887
  source 1..203: mol_type = other DNA

SEQ ID NO: 31851 - DNA, 203 bp, synthetic construct; identical to SEQ ID NO: 9888
  source 1..203: mol_type = other DNA

SEQ ID NO: 31852 - DNA, 203 bp, synthetic construct; identical to SEQ ID NO: 9891
  source 1..203: mol_type = other DNA

SEQ ID NO: 31853 - DNA, 203 bp, synthetic construct; identical to SEQ ID NO: 9892
  source 1..203: mol_type = other DNA

SEQ ID NO: 31854 - DNA, 203 bp, synthetic construct; identical to SEQ ID NO: 9893
  source 1..203: mol_type = other DNA

SEQ ID NO: 31855 - DNA, 203 bp, synthetic construct; identical to SEQ ID NO: 9894
  source 1..203: mol_type = other DNA

SEQ ID NO: 31856 - DNA, 203 bp, synthetic construct; identical to SEQ ID NO: 9896
  source 1..203: mol_type = other DNA

SEQ ID NO: 31857 - DNA, 203 bp, synthetic construct; identical to SEQ ID NO: 9902
  source 1..203: mol_type = other DNA

SEQ ID NO: 31858 - DNA, 203 bp, synthetic construct; identical to SEQ ID NO: 9908
  source 1..203: mol_type = other DNA

SEQ ID NO: 31859 - DNA, 203 bp, synthetic construct; identical to SEQ ID NO: 9910
  source 1..203: mol_type = other DNA

SEQ ID NO: 31860 - DNA, 203 bp, synthetic construct; identical to SEQ ID NO: 9913
  source 1..203: mol_type = other DNA

SEQ ID NO: 31861 - DNA, 203 bp, synthetic construct; identical to SEQ ID NO: 9921
  source 1..203: mol_type = other DNA

SEQ ID NO: 31862 - DNA, 203 bp, synthetic construct; identical to SEQ ID NO: 9997
  source 1..203: mol_type = other DNA

SEQ ID NO: 31863 - DNA, 203 bp, synthetic construct; identical to SEQ ID NO: 10081
  source 1..203: mol_type = other DNA

SEQ ID NO: 31864 - DNA, 203 bp, synthetic construct; identical to SEQ ID NO: 10095
  source 1..203: mol_type = other DNA

SEQ ID NO: 31865 - DNA, 203 bp, synthetic construct; identical to SEQ ID NO: 10096
  source 1..203: mol_type = other DNA

SEQ ID NO: 31866 - DNA, 203 bp, synthetic construct; identical to SEQ ID NO: 10097
  source 1..203: mol_type = other DNA

SEQ ID NO: 31867 - DNA, 203 bp, synthetic construct; identical to SEQ ID NO: 10098
  source 1..203: mol_type = other DNA

SEQ ID NO: 31868 - DNA, 203 bp, synthetic construct; identical to SEQ ID NO: 10099
  source 1..203: mol_type = other DNA

SEQ ID NO: 31869 - DNA, 203 bp, synthetic construct; identical to SEQ ID NO: 10100
  source 1..203: mol_type = other DNA

SEQ ID NO: 31870 - DNA, 203 bp, synthetic construct; identical to SEQ ID NO: 10107
  source 1..203: mol_type = other DNA

SEQ ID NO: 31871 - DNA, 203 bp, synthetic construct; identical to SEQ ID NO: 10108
  source 1..203: mol_type = other DNA

SEQ ID NO: 31872 - DNA, 203 bp, synthetic construct; identical to SEQ ID NO: 10109
  source 1..203: mol_type = other DNA

SEQ ID NO: 31873 - DNA, 203 bp, synthetic construct; identical to SEQ ID NO: 10110
  source 1..203: mol_type = other DNA

SEQ ID NO: 31874 - DNA, 203 bp, synthetic construct; identical to SEQ ID NO: 10213
  source 1..203: mol_type = other DNA

SEQ ID NO: 31875 - DNA, 203 bp, synthetic construct; identical to SEQ ID NO: 10214
  source 1..203: mol_type = other DNA

SEQ ID NO: 31876 - DNA, 203 bp, synthetic construct; identical to SEQ ID NO: 10215
  source 1..203: mol_type = other DNA

SEQ ID NO: 31877 - DNA, 203 bp, synthetic construct; identical to SEQ ID NO: 10216
  source 1..203: mol_type = other DNA

SEQ ID NO: 31878 - DNA, 203 bp, synthetic construct; identical to SEQ ID NO: 10219
  source 1..203: mol_type = other DNA

SEQ ID NO: 31879 - DNA, 203 bp, synthetic construct; identical to SEQ ID NO: 10225
  source 1..203: mol_type = other DNA

SEQ ID NO: 31880 - DNA, 203 bp, synthetic construct; identical to SEQ ID NO: 10234
  source 1..203: mol_type = other DNA

SEQ ID NO: 31881 - DNA, 203 bp, synthetic construct; identical to SEQ ID NO: 10235
  source 1..203: mol_type = other DNA

SEQ ID NO: 31882 - DNA, 203 bp, synthetic construct; identical to SEQ ID NO: 10236
  source 1..203: mol_type = other DNA

SEQ ID NO: 31883 - DNA, 203 bp, synthetic construct; identical to SEQ ID NO: 10250
  source 1..203: mol_type = other DNA

SEQ ID NO: 31884 - DNA, 203 bp, synthetic construct; identical to SEQ ID NO: 10251
  source 1..203: mol_type = other DNA

SEQ ID NO: 31885 - DNA, 203 bp, synthetic construct; identical to SEQ ID NO: 10252
  source 1..203: mol_type = other DNA

SEQ ID NO: 31886 - DNA, 203 bp, synthetic construct; identical to SEQ ID NO: 10275
  source 1..203: mol_type = other DNA

SEQ ID NO: 31887 - DNA, 203 bp, synthetic construct; identical to SEQ ID NO: 10276
  source 1..203: mol_type = other DNA

SEQ ID NO: 31888 - DNA, 203 bp, synthetic construct; identical to SEQ ID NO: 10277
  source 1..203: mol_type = other DNA

SEQ ID NO: 31889 - DNA, 203 bp, synthetic construct; identical to SEQ ID NO: 10278
  source 1..203: mol_type = other DNA

SEQ ID NO: 31890 - DNA, 203 bp, synthetic construct; identical to SEQ ID NO: 10281
  source 1..203: mol_type = other DNA

SEQ ID NO: 31891 - DNA, 203 bp, synthetic construct; identical to SEQ ID NO: 10286
  source 1..203: mol_type = other DNA

SEQ ID NO: 31892 - DNA, 203 bp, synthetic construct; identical to SEQ ID NO: 10287
  source 1..203: mol_type = other DNA

SEQ ID NO: 31893 - DNA, 203 bp, synthetic construct; identical to SEQ ID NO: 10288
  source 1..203: mol_type = other DNA

SEQ ID NO: 31894 - DNA, 203 bp, synthetic construct; identical to SEQ ID NO: 10292
  source 1..203: mol_type = other DNA

SEQ ID NO: 31895 - DNA, 203 bp, synthetic construct; identical to SEQ ID NO: 10293
  source 1..203: mol_type = other DNA

SEQ ID NO: 31896 - DNA, 203 bp, synthetic construct; identical to SEQ ID NO: 10294
  source 1..203: mol_type = other DNA

SEQ ID NO: 31897 - DNA, 203 bp, synthetic construct; identical to SEQ ID NO: 10295
  source 1..203: mol_type = other DNA

SEQ ID NO: 31898 - DNA, 203 bp, synthetic construct; identical to SEQ ID NO: 10296
  source 1..203: mol_type = other DNA

SEQ ID NO: 31899 - DNA, 203 bp, synthetic construct; identical to SEQ ID NO: 10297
  source 1..203: mol_type = other DNA

SEQ ID NO: 31900 - DNA, 203 bp, synthetic construct; identical to SEQ ID NO: 10302
  source 1..203: mol_type = other DNA

SEQ ID NO: 31901 - DNA, 203 bp, synthetic construct; identical to SEQ ID NO: 10303
  source 1..203: mol_type = other DNA

SEQ ID NO: 31902 - DNA, 203 bp, synthetic construct; identical to SEQ ID NO: 10304
  source 1..203: mol_type = other DNA

SEQ ID NO: 31903 - DNA, 203 bp, synthetic construct; identical to SEQ ID NO: 10305
  source 1..203: mol_type = other DNA

SEQ ID NO: 31904 - DNA, 203 bp, synthetic construct; identical to SEQ ID NO: 10306
  source 1..203: mol_type = other DNA

SEQ ID NO: 31905 - DNA, 203 bp, synthetic construct; identical to SEQ ID NO: 10307
  source 1..203: mol_type = other DNA

SEQ ID NO: 31906 - DNA, 203 bp, synthetic construct; identical to SEQ ID NO: 10308
  source 1..203: mol_type = other DNA

SEQ ID NO: 31907 - DNA, 203 bp, synthetic construct; identical to SEQ ID NO: 10309
  source 1..203: mol_type = other DNA

SEQ ID NO: 31908 - DNA, 203 bp, synthetic construct; identical to SEQ ID NO: 10310
  source 1..203: mol_type = other DNA

SEQ ID NO: 31909 - DNA, 203 bp, synthetic construct; identical to SEQ ID NO: 10311
  source 1..203: mol_type = other DNA

SEQ ID NO: 31910 - DNA, 203 bp, synthetic construct; identical to SEQ ID NO: 10313
  source 1..203: mol_type = other DNA

SEQ ID NO: 31911 - DNA, 203 bp, synthetic construct; identical to SEQ ID NO: 10316
  source 1..203: mol_type = other DNA

SEQ ID NO: 31912 - DNA, 203 bp, synthetic construct; identical to SEQ ID NO: 10319
  source 1..203: mol_type = other DNA

SEQ ID NO: 31913 - DNA, 203 bp, synthetic construct; identical to SEQ ID NO: 10320
  source 1..203: mol_type = other DNA

SEQ ID NO: 31914 - DNA, 203 bp, synthetic construct; identical to SEQ ID NO: 10322
  source 1..203: mol_type = other DNA

SEQ ID NO: 31915 - DNA, 203 bp, synthetic construct; identical to SEQ ID NO: 10323
  source 1..203: mol_type = other DNA

SEQ ID NO: 31916 - DNA, 203 bp, synthetic construct; identical to SEQ ID NO: 10324
  source 1..203: mol_type = other DNA

SEQ ID NO: 31917 - DNA, 203 bp, synthetic construct; identical to SEQ ID NO: 10325
  source 1..203: mol_type = other DNA

SEQ ID NO: 31918 - DNA, 203 bp, synthetic construct; identical to SEQ ID NO: 10327
  source 1..203: mol_type = other DNA

SEQ ID NO: 31919 - DNA, 203 bp, synthetic construct; identical to SEQ ID NO: 10328
  source 1..203: mol_type = other DNA

SEQ ID NO: 31920 - DNA, 203 bp, synthetic construct; identical to SEQ ID NO: 10329
  source 1..203: mol_type = other DNA

SEQ ID NO: 31921 - DNA, 203 bp, synthetic construct; identical to SEQ ID NO: 10343
  source 1..203: mol_type = other DNA

SEQ ID NO: 31922 - DNA, 203 bp, synthetic construct; identical to SEQ ID NO: 10344
  source 1..203: mol_type = other DNA

SEQ ID NO: 31923 - DNA, 203 bp, synthetic construct; identical to SEQ ID NO: 10345
  source 1..203: mol_type = other DNA

SEQ ID NO: 31924 - DNA, 203 bp, synthetic construct; identical to SEQ ID NO: 10346
  source 1..203: mol_type = other DNA

SEQ ID NO: 31925 - DNA, 203 bp, synthetic construct; identical to SEQ ID NO: 10347
  source 1..203: mol_type = other DNA

SEQ ID NO: 31926 - DNA, 203 bp, synthetic construct; identical to SEQ ID NO: 10348
  source 1..203: mol_type = other DNA

SEQ ID NO: 31927 - DNA, 203 bp, synthetic construct; identical to SEQ ID NO: 10349
  source 1..203: mol_type = other DNA

SEQ ID NO: 31928 - DNA, 203 bp, synthetic construct; identical to SEQ ID NO: 10350
  source 1..203: mol_type = other DNA

SEQ ID NO: 31929 - DNA, 203 bp, synthetic construct; identical to SEQ ID NO: 10351
  source 1..203: mol_type = other DNA

SEQ ID NO: 31930 - DNA, 203 bp, synthetic construct; identical to SEQ ID NO: 10352
  source 1..203: mol_type = other DNA

SEQ ID NO: 31931 - DNA, 203 bp, synthetic construct; identical to SEQ ID NO: 10353
  source 1..203: mol_type = other DNA

SEQ ID NO: 31932 - DNA, 203 bp, synthetic construct; identical to SEQ ID NO: 10357
  source 1..203: mol_type = other DNA

SEQ ID NO: 31933 - DNA, 203 bp, synthetic construct; identical to SEQ ID NO: 10358
  source 1..203: mol_type = other DNA

SEQ ID NO: 31934 - DNA, 203 bp, synthetic construct; identical to SEQ ID NO: 10359
  source 1..203: mol_type = other DNA

SEQ ID NO: 31935 - DNA, 203 bp, synthetic construct; identical to SEQ ID NO: 10372
  source 1..203: mol_type = other DNA

SEQ ID NO: 31936 - DNA, 203 bp, synthetic construct; identical to SEQ ID NO: 10373
  source 1..203: mol_type = other DNA

SEQ ID NO: 31937 - DNA, 203 bp, synthetic construct; identical to SEQ ID NO: 10374
  source 1..203: mol_type = other DNA

SEQ ID NO: 31938 - DNA, 203 bp, synthetic construct; identical to SEQ ID NO: 10377
  source 1..203: mol_type = other DNA

SEQ ID NO: 31939 - DNA, 203 bp, synthetic construct; identical to SEQ ID NO: 10378
  source 1..203: mol_type = other DNA

SEQ ID NO: 31940 - DNA, 203 bp, synthetic construct; identical to SEQ ID NO: 10379
  source 1..203: mol_type = other DNA

SEQ ID NO: 31941 - DNA, 203 bp, synthetic construct; identical to SEQ ID NO: 10382
  source 1..203: mol_type = other DNA

SEQ ID NO: 31942 - DNA, 203 bp, synthetic construct; identical to SEQ ID NO: 10383
  source 1..203: mol_type = other DNA

SEQ ID NO: 31943 - DNA, 203 bp, synthetic construct; identical to SEQ ID NO: 10384
  source 1..203: mol_type = other DNA

SEQ ID NO: 31944 - DNA, 203 bp, synthetic construct; identical to SEQ ID NO: 10386
  source 1..203: mol_type = other DNA

SEQ ID NO: 31945 - DNA, 203 bp, synthetic construct; identical to SEQ ID NO: 10387
  source 1..203: mol_type = other DNA

SEQ ID NO: 31946 - DNA, 203 bp, synthetic construct; identical to SEQ ID NO: 10388
  source 1..203: mol_type = other DNA

SEQ ID NO: 31947 - DNA, 203 bp, synthetic construct; identical to SEQ ID NO: 10408
  source 1..203: mol_type = other DNA

SEQ ID NO: 31948 - DNA, 203 bp, synthetic construct; identical to SEQ ID NO: 10409
  source 1..203: mol_type = other DNA

SEQ ID NO: 31949 - DNA, 203 bp, synthetic construct; identical to SEQ ID NO: 10410
  source 1..203: mol_type = other DNA

SEQ ID NO: 31950 - DNA, 203 bp, synthetic construct; identical to SEQ ID NO: 10416
  source 1..203: mol_type = other DNA

SEQ ID NO: 31951 - DNA, 203 bp, synthetic construct; identical to SEQ ID NO: 10417
  source 1..203: mol_type = other DNA

SEQ ID NO: 31952 - DNA, 203 bp, synthetic construct; identical to SEQ ID NO: 10426
  source 1..203: mol_type = other DNA

SEQ ID NO: 31953 - DNA, 203 bp, synthetic construct; identical to SEQ ID NO: 10428
  source 1..203: mol_type = other DNA

SEQ ID NO: 31954 - DNA, 203 bp, synthetic construct; identical to SEQ ID NO: 10448
  source 1..203: mol_type = other DNA

SEQ ID NO: 31955 - DNA, 203 bp, synthetic construct; identical to SEQ ID NO: 10454
  source 1..203: mol_type = other DNA

SEQ ID NO: 31956 - DNA, 203 bp, synthetic construct; identical to SEQ ID NO: 10462
  source 1..203: mol_type = other DNA

SEQ ID NO: 31957 - DNA, 203 bp, synthetic construct; identical to SEQ ID NO: 10465
  source 1..203: mol_type = other DNA

SEQ ID NO: 31958 - DNA, 203 bp, synthetic construct; identical to SEQ ID NO: 10469
  source 1..203: mol_type = other DNA

SEQ ID NO: 31959 - DNA, 203 bp, synthetic construct; identical to SEQ ID NO: 10472
  source 1..203: mol_type = other DNA

SEQ ID NO: 31960 - DNA, 203 bp, synthetic construct; identical to SEQ ID NO: 10473
  source 1..203: mol_type = other DNA

SEQ ID NO: 31961 - DNA, 203 bp, synthetic construct; identical to SEQ ID NO: 10481
  source 1..203: mol_type = other DNA

SEQ ID NO: 31962 - DNA, 203 bp, synthetic construct; identical to SEQ ID NO: 10482
  source 1..203: mol_type = other DNA

SEQ ID NO: 31963 - DNA, 203 bp, synthetic construct; identical to SEQ ID NO: 10485
  source 1..203: mol_type = other DNA

SEQ ID NO: 31964 - DNA, 203 bp, synthetic construct; identical to SEQ ID NO: 10486
  source 1..203: mol_type = other DNA

SEQ ID NO: 31965 - DNA, 203 bp, synthetic construct; identical to SEQ ID NO: 10490
  source 1..203: mol_type = other DNA

SEQ ID NO: 31966 - DNA, 203 bp, synthetic construct; identical to SEQ ID NO: 10494
  source 1..203: mol_type = other DNA

SEQ ID NO: 31967 - DNA, 203 bp, synthetic construct; identical to SEQ ID NO: 10495
  source 1..203: mol_type = other DNA

SEQ ID NO: 31968 - DNA, 203 bp, synthetic construct; identical to SEQ ID NO: 10496
  source 1..203: mol_type = other DNA

SEQ ID NO: 31969 - DNA, 203 bp, synthetic construct; identical to SEQ ID NO: 10497
  source 1..203: mol_type = other DNA

SEQ ID NO: 31970 - DNA, 203 bp, synthetic construct; identical to SEQ ID NO: 10500
  source 1..203: mol_type = other DNA

SEQ ID NO: 31971 - DNA, 203 bp, synthetic construct; identical to SEQ ID NO: 10502
  source 1..203: mol_type = other DNA

SEQ ID NO: 31972 - DNA, 203 bp, synthetic construct; identical to SEQ ID NO: 10505
  source 1..203: mol_type = other DNA

SEQ ID NO: 31973 - DNA, 203 bp, synthetic construct; identical to SEQ ID NO: 10507
  source 1..203: mol_type = other DNA

SEQ ID NO: 31974 - DNA, 203 bp, synthetic construct; identical to SEQ ID NO: 10513
  source 1..203: mol_type = other DNA

SEQ ID NO: 31975 - DNA, 203 bp, synthetic construct; identical to SEQ ID NO: 10525
  source 1..203: mol_type = other DNA

SEQ ID NO: 31976 - DNA, 203 bp, synthetic construct; identical to SEQ ID NO: 10534
  source 1..203: mol_type = other DNA

SEQ ID NO: 31977 - DNA, 203 bp, synthetic construct; identical to SEQ ID NO: 10539
  source 1..203: mol_type = other DNA

SEQ ID NO: 31978 - DNA, 203 bp, synthetic construct; identical to SEQ ID NO: 10597
  source 1..203: mol_type = other DNA

SEQ ID NO: 31979 - DNA, 203 bp, synthetic construct; identical to SEQ ID NO: 10603
  source 1..203: mol_type = other DNA

SEQ ID NO: 31980 - DNA, 203 bp, synthetic construct; identical to SEQ ID NO: 10604
  source 1..203: mol_type = other DNA

SEQ ID NO: 31981 - DNA, 203 bp, synthetic construct; identical to SEQ ID NO: 10624
  source 1..203: mol_type = other DNA

SEQ ID NO: 31982 - DNA, 203 bp, synthetic construct; identical to SEQ ID NO: 10625
  source 1..203: mol_type = other DNA

SEQ ID NO: 31983 - DNA, 203 bp, synthetic construct; identical to SEQ ID NO: 10626
  source 1..203: mol_type = other DNA

SEQ ID NO: 31984 - DNA, 203 bp, synthetic construct; identical to SEQ ID NO: 10627
  source 1..203: mol_type = other DNA

SEQ ID NO: 31985 - DNA, 203 bp, synthetic construct; identical to SEQ ID NO: 10647
  source 1..203: mol_type = other DNA

SEQ ID NO: 31986 - DNA, 203 bp, synthetic construct; identical to SEQ ID NO: 10649
  source 1..203: mol_type = other DNA

SEQ ID NO: 31987 - DNA, 203 bp, synthetic construct; identical to SEQ ID NO: 10650
  source 1..203: mol_type = other DNA

SEQ ID NO: 31988 - DNA, 203 bp, synthetic construct; identical to SEQ ID NO: 10651
  source 1..203: mol_type = other DNA

SEQ ID NO: 31989 - DNA, 203 bp, synthetic construct; identical to SEQ ID NO: 10665
  source 1..203: mol_type = other DNA

SEQ ID NO: 31990 - DNA, 203 bp, synthetic construct; identical to SEQ ID NO: 10666
  source 1..203: mol_type = other DNA

SEQ ID NO: 31991 - DNA, 203 bp, synthetic construct; identical to SEQ ID NO: 10668
  source 1..203: mol_type = other DNA

SEQ ID NO: 31992 - DNA, 203 bp, synthetic construct; identical to SEQ ID NO: 10672
  source 1..203: mol_type = other DNA

SEQ ID NO: 31993 - DNA, 203 bp, synthetic construct; identical to SEQ ID NO: 10673
  source 1..203: mol_type = other DNA

SEQ ID NO: 31994 - DNA, 203 bp, synthetic construct; identical to SEQ ID NO: 10678
  source 1..203: mol_type = other DNA

SEQ ID NO: 31995 - DNA, 203 bp, synthetic construct; identical to SEQ ID NO: 10691
  source 1..203: mol_type = other DNA

SEQ ID NO: 31996 - DNA, 203 bp, synthetic construct; identical to SEQ ID NO: 10692
  source 1..203: mol_type = other DNA

SEQ ID NO: 31997 - DNA, 203 bp, synthetic construct; identical to SEQ ID NO: 10697
  source 1..203: mol_type = other DNA

SEQ ID NO: 31998 - DNA, 203 bp, synthetic construct; identical to SEQ ID NO: 10723
  source 1..203: mol_type = other DNA

SEQ ID NO: 31999 - DNA, 203 bp, synthetic construct; identical to SEQ ID NO: 10725
  source 1..203: mol_type = other DNA

SEQ ID NO: 32000 - DNA, 203 bp, synthetic construct; identical to SEQ ID NO: 10727
  source 1..203: mol_type = other DNA

SEQ ID NO: 32001 - DNA, 203 bp, synthetic construct; identical to SEQ ID NO: 10733
  source 1..203: mol_type = other DNA

SEQ ID NO: 32002 - DNA, 203 bp, synthetic construct; identical to SEQ ID NO: 10751
  source 1..203: mol_type = other DNA

SEQ ID NO: 32003 - DNA, 203 bp, synthetic construct; identical to SEQ ID NO: 10752
  source 1..203: mol_type = other DNA

SEQ ID NO: 32004 - DNA, 203 bp, synthetic construct; identical to SEQ ID NO: 10766
  source 1..203: mol_type = other DNA

SEQ ID NO: 32005 - DNA, 203 bp, synthetic construct; identical to SEQ ID NO: 10767
  source 1..203: mol_type = other DNA

SEQ ID NO: 32006 - DNA, 203 bp, synthetic construct; identical to SEQ ID NO: 10768
  source 1..203: mol_type = other DNA

SEQ ID NO: 32007 - DNA, 203 bp, synthetic construct; identical to SEQ ID NO: 10769
  source 1..203: mol_type = other DNA

SEQ ID NO: 32008 - DNA, 203 bp, synthetic construct; identical to SEQ ID NO: 10771
  source 1..203: mol_type = other DNA

SEQ ID NO: 32009 - DNA, 203 bp, synthetic construct; identical to SEQ ID NO: 10772
  source 1..203: mol_type = other DNA

SEQ ID NO: 32010 - DNA, 203 bp, synthetic construct; identical to SEQ ID NO: 10773
  source 1..203: mol_type = other DNA

SEQ ID NO: 32011 - DNA, 203 bp, synthetic construct; identical to SEQ ID NO: 10774
  source 1..203: mol_type = other DNA

SEQ ID NO: 32012 - DNA, 203 bp, synthetic construct; identical to SEQ ID NO: 10786
  source 1..203: mol_type = other DNA

SEQ ID NO: 32013 - DNA, 203 bp, synthetic construct; identical to SEQ ID NO: 10789
  source 1..203: mol_type = other DNA

SEQ ID NO: 32014 - DNA, 203 bp, synthetic construct; identical to SEQ ID NO: 10792
  source 1..203: mol_type = other DNA

SEQ ID NO: 32015 - DNA, 203 bp, synthetic construct; identical to SEQ ID NO: 10801
  source 1..203: mol_type = other DNA

SEQ ID NO: 32016 - DNA, 203 bp, synthetic construct; identical to SEQ ID NO: 10802
  source 1..203: mol_type = other DNA

SEQ ID NO: 32017 - DNA, 203 bp, synthetic construct; identical to SEQ ID NO: 10803
  source 1..203: mol_type = other DNA

SEQ ID NO: 32018 - DNA, 203 bp, synthetic construct; identical to SEQ ID NO: 10815
  source 1..203: mol_type = other DNA

SEQ ID NO: 32019 - DNA, 203 bp, synthetic construct; identical to SEQ ID NO: 10856
  source 1..203: mol_type = other DNA

SEQ ID NO: 32020 - DNA, 203 bp, synthetic construct; identical to SEQ ID NO: 10860
  source 1..203: mol_type = other DNA

SEQ ID NO: 32021 - DNA, 203 bp, synthetic construct; identical to SEQ ID NO: 10861
  source 1..203: mol_type = other DNA

SEQ ID NO: 32022 - DNA, 203 bp, synthetic construct; identical to SEQ ID NO: 10863
  source 1..203: mol_type = other DNA

SEQ ID NO: 32023 - DNA, 203 bp, synthetic construct; identical to SEQ ID NO: 10864
  source 1..203: mol_type = other DNA

SEQ ID NO: 32024 - DNA, 203 bp, synthetic construct; identical to SEQ ID NO: 10865
  source 1..203: mol_type = other DNA

SEQ ID NO: 32025 - DNA, 203 bp, synthetic construct; identical to SEQ ID NO: 10870
  source 1..203: mol_type = other DNA

SEQ ID NO: 32026 - DNA, 203 bp, synthetic construct; identical to SEQ ID NO: 10871
  source 1..203: mol_type = other DNA

SEQ ID NO: 32027 - DNA, 203 bp, synthetic construct; identical to SEQ ID NO: 10873
  source 1..203: mol_type = other DNA

SEQ ID NO: 32028 - DNA, 203 bp, synthetic construct; identical to SEQ ID NO: 10903
  source 1..203: mol_type = other DNA

SEQ ID NO: 32029 - DNA, 203 bp, synthetic construct; identical to SEQ ID NO: 10929
  source 1..203: mol_type = other DNA

SEQ ID NO: 32030 - DNA, 203 bp, synthetic construct; identical to SEQ ID NO: 10930
  source 1..203: mol_type = other DNA

SEQ ID NO: 32031 - DNA, 203 bp, synthetic construct; identical to SEQ ID NO: 10931
  source 1..203: mol_type = other DNA

SEQ ID NO: 32032 - DNA, 203 bp, synthetic construct; identical to SEQ ID NO: 10932
  source 1..203: mol_type = other DNA

SEQ ID NO: 32033 - DNA, 203 bp, synthetic construct; identical to SEQ ID NO: 10933
  source 1..203: mol_type = other DNA

SEQ ID NO: 32034 - DNA, 203 bp, synthetic construct; identical to SEQ ID NO: 10935
  source 1..203: mol_type = other DNA

SEQ ID NO: 32035 - DNA, 203 bp, synthetic construct; identical to SEQ ID NO: 10944
  source 1..203: mol_type = other DNA

SEQ ID NO: 32036 - DNA, 203 bp, synthetic construct; identical to SEQ ID NO: 10948
  source 1..203: mol_type = other DNA

SEQ ID NO: 32037 - DNA, 203 bp, synthetic construct; identical to SEQ ID NO: 10950
  source 1..203: mol_type = other DNA

SEQ ID NO: 32038 - DNA, 203 bp, synthetic construct; identical to SEQ ID NO: 10953
  source 1..203: mol_type = other DNA

SEQ ID NO: 32039 - DNA, 203 bp, synthetic construct; identical to SEQ ID NO: 10955
  source 1..203: mol_type = other DNA

SEQ ID NO: 32040 - DNA, 203 bp, synthetic construct; identical to SEQ ID NO: 10959
  source 1..203: mol_type = other DNA

SEQ ID NO: 32041 - DNA, 203 bp, synthetic construct; identical to SEQ ID NO: 10960
  source 1..203: mol_type = other DNA

SEQ ID NO: 32042 - DNA, 203 bp, synthetic construct; identical to SEQ ID NO: 10961
  source 1..203: mol_type = other DNA

SEQ ID NO: 32043 - DNA, 203 bp, synthetic construct; identical to SEQ ID NO: 10962
  source 1..203: mol_type = other DNA

SEQ ID NO: 32044 - DNA, 203 bp, synthetic construct; identical to SEQ ID NO: 10963
  source 1..203: mol_type = other DNA

SEQ ID NO: 32045 - DNA, 203 bp, synthetic construct; identical to SEQ ID NO: 10964
  source 1..203: mol_type = other DNA

SEQ ID NO: 32046 - DNA, 203 bp, synthetic construct; identical to SEQ ID NO: 10965
  source 1..203: mol_type = other DNA

SEQ ID NO: 32047 - DNA, 203 bp, synthetic construct; identical to SEQ ID NO: 10973
  source 1..203: mol_type = other DNA

SEQ ID NO: 32048 - DNA, 203 bp, synthetic construct; identical to SEQ ID NO: 10978
  source 1..203: mol_type = other DNA

SEQ ID NO: 32049 - DNA, 203 bp, synthetic construct; identical to SEQ ID NO: 11013
  source 1..203: mol_type = other DNA

SEQ ID NO: 32050 - DNA, 203 bp, synthetic construct; identical to SEQ ID NO: 11018
  source 1..203: mol_type = other DNA

SEQ ID NO: 32051 - DNA, 203 bp, synthetic construct; identical to SEQ ID NO: 11025
  source 1..203: mol_type = other DNA

SEQ ID NO: 32052 - DNA, 203 bp, synthetic construct; identical to SEQ ID NO: 11026
  source 1..203: mol_type = other DNA

SEQ ID NO: 32053 - DNA, 203 bp, synthetic construct; identical to SEQ ID NO: 11030
  source 1..203: mol_type = other DNA

SEQ ID NO: 32054 - DNA, 203 bp, synthetic construct; identical to SEQ ID NO: 11041
  source 1..203: mol_type = other DNA

SEQ ID NO: 32055 - DNA, 203 bp, synthetic construct; identical to SEQ ID NO: 11042
  source 1..203: mol_type = other DNA

SEQ ID NO: 32056 - DNA, 203 bp, synthetic construct; identical to SEQ ID NO: 11043
  source 1..203: mol_type = other DNA

SEQ ID NO: 32057 - DNA, 203 bp, synthetic construct; identical to SEQ ID NO: 11045
  source 1..203: mol_type = other DNA

SEQ ID NO: 32058 - DNA, 203 bp, synthetic construct; identical to SEQ ID NO: 11047
  source 1..203: mol_type = other DNA

SEQ ID NO: 32059 - DNA, 203 bp, synthetic construct; identical to SEQ ID NO: 11067
  source 1..203: mol_type = other DNA

SEQ ID NO: 32060 - DNA, 203 bp, synthetic construct; identical to SEQ ID NO: 11068
  source 1..203: mol_type = other DNA

SEQ ID NO: 32061 - DNA, 203 bp, synthetic construct; identical to SEQ ID NO: 11069
  source 1..203: mol_type = other DNA

SEQ ID NO: 32062 - DNA, 203 bp, synthetic construct; identical to SEQ ID NO: 11081
  source 1..203: mol_type = other DNA

SEQ ID NO: 32063 - DNA, 203 bp, synthetic construct; identical to SEQ ID NO: 11082
  source 1..203: mol_type = other DNA

SEQ ID NO: 32064 - DNA, 203 bp, synthetic construct; identical to SEQ ID NO: 11084
  source 1..203: mol_type = other DNA

SEQ ID NO: 32065 - DNA, 203 bp, synthetic construct; identical to SEQ ID NO: 11085
  source 1..203: mol_type = other DNA

SEQ ID NO: 32066 - DNA, 203 bp, synthetic construct; identical to SEQ ID NO: 11104
  source 1..203: mol_type = other DNA

SEQ ID NO: 32067 - DNA, 203 bp, synthetic construct; identical to SEQ ID NO: 11105
  source 1..203: mol_type = other DNA

SEQ ID NO: 32068 - DNA, 203 bp, synthetic construct; identical to SEQ ID NO: 11106
  source 1..203: mol_type = other DNA

SEQ ID NO: 32069 - DNA, 203 bp, synthetic construct; identical to SEQ ID NO: 11112
  source 1..203: mol_type = other DNA

SEQ ID NO: 32070 - DNA, 203 bp, synthetic construct; identical to SEQ ID NO: 11120
  source 1..203: mol_type = other DNA

SEQ ID NO: 32071 - DNA, 203 bp, synthetic construct; identical to SEQ ID NO: 11121
  source 1..203: mol_type = other DNA

SEQ ID NO: 32072 - DNA, 203 bp, synthetic construct; identical to SEQ ID NO: 11122
  source 1..203: mol_type = other DNA

SEQ ID NO: 32073 - DNA, 203 bp, synthetic construct; identical to SEQ ID NO: 11123
  source 1..203: mol_type = other DNA

SEQ ID NO: 32074 - DNA, 203 bp, synthetic construct; identical to SEQ ID NO: 11125
  source 1..203: mol_type = other DNA

SEQ ID NO: 32075 - DNA, 203 bp, synthetic construct; identical to SEQ ID NO: 11134
  source 1..203: mol_type = other DNA

SEQ ID NO: 32076 - DNA, 203 bp, synthetic construct; identical to SEQ ID NO: 11178
  source 1..203: mol_type = other DNA

SEQ ID NO: 32077 - DNA, 203 bp, synthetic construct; identical to SEQ ID NO: 11179
  source 1..203: mol_type = other DNA

SEQ ID NO: 32078 - DNA, 203 bp, synthetic construct; identical to SEQ ID NO: 11181
  source 1..203: mol_type = other DNA

SEQ ID NO: 32079 - DNA, 203 bp, synthetic construct; identical to SEQ ID NO: 11200
  source 1..203: mol_type = other DNA

SEQ ID NO: 32080 - DNA, 203 bp, synthetic construct; identical to SEQ ID NO: 11212
  source 1..203: mol_type = other DNA

SEQ ID NO: 32081 - DNA, 203 bp, synthetic construct; identical to SEQ ID NO: 11244
  source 1..203: mol_type = other DNA

SEQ ID NO: 32082 - DNA, 203 bp, synthetic construct; identical to SEQ ID NO: 11282
  source 1..203: mol_type = other DNA

SEQ ID NO: 32083 - DNA, 203 bp, synthetic construct; identical to SEQ ID NO: 11283
  source 1..203: mol_type = other DNA

SEQ ID NO: 32084 - DNA, 203 bp, synthetic construct; identical to SEQ ID NO: 11292
  source 1..203: mol_type = other DNA

SEQ ID NO: 32085 - DNA, 203 bp, synthetic construct; identical to SEQ ID NO: 11293
  source 1..203: mol_type = other DNA

SEQ ID NO: 32086 - DNA, 203 bp, synthetic construct; identical to SEQ ID NO: 11313
  source 1..203: mol_type = other DNA

SEQ ID NO: 32087 - DNA, 203 bp, synthetic construct; identical to SEQ ID NO: 11314
  source 1..203: mol_type = other DNA

SEQ ID NO: 32088 - DNA, 203 bp, synthetic construct; identical to SEQ ID NO: 11317
  source 1..203: mol_type = other DNA

SEQ ID NO: 32089 - DNA, 203 bp, synthetic construct; identical to SEQ ID NO: 11318
  source 1..203: mol_type = other DNA

SEQ ID NO: 32090 - DNA, 203 bp, synthetic construct; identical to SEQ ID NO: 11342
  source 1..203: mol_type = other DNA

SEQ ID NO: 32091 - DNA, 203 bp, synthetic construct; identical to SEQ ID NO: 11343
  source 1..203: mol_type = other DNA

SEQ ID NO: 32092 - DNA, 203 bp, synthetic construct; identical to SEQ ID NO: 11344
  source 1..203: mol_type = other DNA

SEQ ID NO: 32093 - DNA, 203 bp, synthetic construct; identical to SEQ ID NO: 11345
  source 1..203: mol_type = other DNA

SEQ ID NO: 32094 - DNA, 203 bp, synthetic construct; identical to SEQ ID NO: 11346
  source 1..203: mol_type = other DNA

SEQ ID NO: 32095 - DNA, 203 bp, synthetic construct; identical to SEQ ID NO: 11347
  source 1..203: mol_type = other DNA

SEQ ID NO: 32096 - DNA, 203 bp, synthetic construct; identical to SEQ ID NO: 11348
  source 1..203: mol_type = other DNA

SEQ ID NO: 32097 - DNA, 203 bp, synthetic construct; identical to SEQ ID NO: 11349
  source 1..203: mol_type = other DNA

SEQ ID NO: 32098 - DNA, 203 bp, synthetic construct; identical to SEQ ID NO: 11350
  source 1..203: mol_type = other DNA

SEQ ID NO: 32099 - DNA, 203 bp, synthetic construct; identical to SEQ ID NO: 11351
  source 1..203: mol_type = other DNA

SEQ ID NO: 32100 - DNA, 203 bp, synthetic construct; identical to SEQ ID NO: 11352
  source 1..203: mol_type = other DNA

SEQ ID NO: 32101 - DNA, 203 bp, synthetic construct; identical to SEQ ID NO: 11353
  source 1..203: mol_type = other DNA

SEQ ID NO: 32102 - DNA, 203 bp, synthetic construct; identical to SEQ ID NO: 11354
  source 1..203: mol_type = other DNA

SEQ ID NO: 32103 - DNA, 203 bp, synthetic construct; identical to SEQ ID NO: 11355
  source 1..203: mol_type = other DNA

SEQ ID NO: 32104 - DNA, 203 bp, synthetic construct; identical to SEQ ID NO: 11357
  source 1..203: mol_type = other DNA

SEQ ID NO: 32105 - DNA, 203 bp, synthetic construct; identical to SEQ ID NO: 11359
  source 1..203: mol_type = other DNA

SEQ ID NO: 32106 - DNA, 203 bp, synthetic construct; identical to SEQ ID NO: 11360
  source 1..203: mol_type = other DNA

SEQ ID NO: 32107 - DNA, 203 bp, synthetic construct; identical to SEQ ID NO: 11361
  source 1..203: mol_type = other DNA

SEQ ID NO: 32108 - DNA, 203 bp, synthetic construct; identical to SEQ ID NO: 11363
  source 1..203: mol_type = other DNA

SEQ ID NO: 32109 - DNA, 203 bp, synthetic construct; identical to SEQ ID NO: 11364
  source 1..203: mol_type = other DNA

SEQ ID NO: 32110 - DNA, 203 bp, synthetic construct; identical to SEQ ID NO: 11365
  source 1..203: mol_type = other DNA

SEQ ID NO: 32111 - DNA, 203 bp, synthetic construct; identical to SEQ ID NO: 11367
  source 1..203: mol_type = other DNA

SEQ ID NO: 32112 - DNA, 203 bp, synthetic construct; identical to SEQ ID NO: 11368
  source 1..203: mol_type = other DNA

SEQ ID NO: 32113 - DNA, 203 bp, synthetic construct; identical to SEQ ID NO: 11369
  source 1..203: mol_type = other DNA

SEQ ID NO: 32114 - DNA, 203 bp, synthetic construct; identical to SEQ ID NO: 11370
  source 1..203: mol_type = other DNA

SEQ ID NO: 32115 - DNA, 203 bp, synthetic construct; identical to SEQ ID NO: 11385
  source 1..203: mol_type = other DNA

SEQ ID NO: 32116 - DNA, 203 bp, synthetic construct; identical to SEQ ID NO: 11386
  source 1..203: mol_type = other DNA

SEQ ID NO: 32117 - DNA, 203 bp, synthetic construct; identical to SEQ ID NO: 11387
  source 1..203: mol_type = other DNA

SEQ ID NO: 32118 - DNA, 203 bp, synthetic construct; identical to SEQ ID NO: 11388
  source 1..203: mol_type = other DNA

SEQ ID NO: 32119 - DNA, 203 bp, synthetic construct; identical to SEQ ID NO: 11389
  source 1..203: mol_type = other DNA

SEQ ID NO: 32120 - DNA, 203 bp, synthetic construct; identical to SEQ ID NO: 11395
  source 1..203: mol_type = other DNA

SEQ ID NO: 32121 - DNA, 203 bp, synthetic construct; identical to SEQ ID NO: 11396
  source 1..203: mol_type = other DNA

SEQ ID NO: 32122 - DNA, 203 bp, synthetic construct; identical to SEQ ID NO: 11397
  source 1..203: mol_type = other DNA

SEQ ID NO: 32123 - DNA, 203 bp, synthetic construct; identical to SEQ ID NO: 11398
  source 1..203: mol_type = other DNA

SEQ ID NO: 32124 - DNA, 203 bp, synthetic construct; identical to SEQ ID NO: 11404
  source 1..203: mol_type = other DNA

SEQ ID NO: 32125 - DNA, 203 bp, synthetic construct; identical to SEQ ID NO: 11405
  source 1..203: mol_type = other DNA

SEQ ID NO: 32126 - DNA, 203 bp, synthetic construct; identical to SEQ ID NO: 11411
  source 1..203: mol_type = other DNA

SEQ ID NO: 32127 - DNA, 203 bp, synthetic construct; identical to SEQ ID NO: 11412
  source 1..203: mol_type = other DNA

SEQ ID NO: 32128 - DNA, 203 bp, synthetic construct; identical to SEQ ID NO: 11413
  source 1..203: mol_type = other DNA

SEQ ID NO: 32129 - DNA, 203 bp, synthetic construct; identical to SEQ ID NO: 11439
  source 1..203: mol_type = other DNA

SEQ ID NO: 32130 - DNA, 203 bp, synthetic construct; identical to SEQ ID NO: 11451
  source 1..203: mol_type = other DNA

SEQ ID NO: 32131 - DNA, 203 bp, synthetic construct; identical to SEQ ID NO: 11461
  source 1..203: mol_type = other DNA

SEQ ID NO: 32132 - DNA, 203 bp, synthetic construct; identical to SEQ ID NO: 11462
  source 1..203: mol_type = other DNA

SEQ ID NO: 32133 - DNA, 203 bp, synthetic construct; identical to SEQ ID NO: 11466
  source 1..203: mol_type = other DNA

SEQ ID NO: 32134 - DNA, 203 bp, synthetic construct; identical to SEQ ID NO: 11481
  source 1..203: mol_type = other DNA

SEQ ID NO: 32135 - DNA, 203 bp, synthetic construct; identical to SEQ ID NO: 11483
  source 1..203: mol_type = other DNA

SEQ ID NO: 32136 - DNA, 203 bp, synthetic construct; identical to SEQ ID NO: 11504
  source 1..203: mol_type = other DNA

SEQ ID NO: 32137 - DNA, 203 bp, synthetic construct; identical to SEQ ID NO: 11505
  source 1..203: mol_type = other DNA

SEQ ID NO: 32138 - DNA, 203 bp, synthetic construct; identical to SEQ ID NO: 11517
  source 1..203: mol_type = other DNA

SEQ ID NO: 32139 - DNA, 203 bp, synthetic construct; identical to SEQ ID NO: 11518
  source 1..203: mol_type = other DNA

SEQ ID NO: 32140 - DNA, 203 bp, synthetic construct; identical to SEQ ID NO: 11519
  source 1..203: mol_type = other DNA

SEQ ID NO: 32141 - DNA, 203 bp, synthetic construct; identical to SEQ ID NO: 11521
  source 1..203: mol_type = other DNA

SEQ ID NO: 32142 - DNA, 203 bp, synthetic construct; identical to SEQ ID NO: 11522
  source 1..203: mol_type = other DNA

SEQ ID NO: 32143 - DNA, 203 bp, synthetic construct; identical to SEQ ID NO: 11523
  source 1..203: mol_type = other DNA

SEQ ID NO: 32144 - DNA, 203 bp, synthetic construct; identical to SEQ ID NO: 11545
  source 1..203: mol_type = other DNA

SEQ ID NO: 32145 - DNA, 203 bp, synthetic construct; identical to SEQ ID NO: 11546
  source 1..203: mol_type = other DNA

SEQ ID NO: 32146 - DNA, 203 bp, synthetic construct; identical to SEQ ID NO: 11547
  source 1..203: mol_type = other DNA

SEQ ID NO: 32147 - DNA, 203 bp, synthetic construct; identical to SEQ ID NO: 11548
  source 1..203: mol_type = other DNA

SEQ ID NO: 32148 - DNA, 203 bp, synthetic construct; identical to SEQ ID NO: 11559
  source 1..203: mol_type = other DNA

SEQ ID NO: 32149 - DNA, 203 bp, synthetic construct; identical to SEQ ID NO: 11565
  source 1..203: mol_type = other DNA

SEQ ID NO: 32150 - DNA, 203 bp, synthetic construct; identical to SEQ ID NO: 11566
  source 1..203: mol_type = other DNA

SEQ ID NO: 32151 - DNA, 203 bp, synthetic construct; identical to SEQ ID NO: 11569
  source 1..203: mol_type = other DNA

SEQ ID NO: 32152 - DNA, 203 bp, synthetic construct; identical to SEQ ID NO: 11570
  source 1..203: mol_type = other DNA

SEQ ID NO: 32153 - DNA, 203 bp, synthetic construct; identical to SEQ ID NO: 11571
  source 1..203: mol_type = other DNA

SEQ ID NO: 32154 - DNA, 203 bp, synthetic construct; identical to SEQ ID NO: 11572
  source 1..203: mol_type = other DNA

SEQ ID NO: 32155 - DNA, 203 bp, synthetic construct; identical to SEQ ID NO: 11581
  source 1..203: mol_type = other DNA

SEQ ID NO: 32156 - DNA, 203 bp, synthetic construct; identical to SEQ ID NO: 11582
  source 1..203: mol_type = other DNA

SEQ ID NO: 32157 - DNA, 203 bp, synthetic construct; identical to SEQ ID NO: 11594
  source 1..203: mol_type = other DNA

SEQ ID NO: 32158 - DNA, 203 bp, synthetic construct; identical to SEQ ID NO: 11596
  source 1..203: mol_type = other DNA

SEQ ID NO: 32159 - DNA, 203 bp, synthetic construct; identical to SEQ ID NO: 11597
  source 1..203: mol_type = other DNA

SEQ ID NO: 32160 - DNA, 203 bp, synthetic construct; identical to SEQ ID NO: 11601
  source 1..203: mol_type = other DNA

SEQ ID NO: 32161 - DNA, 203 bp, synthetic construct; identical to SEQ ID NO: 11602
  source 1..203: mol_type = other DNA

SEQ ID NO: 32162 - DNA, 203 bp, synthetic construct; identical to SEQ ID NO: 11603
  source 1..203: mol_type = other DNA

SEQ ID NO: 32163 - DNA, 203 bp, synthetic construct; identical to SEQ ID NO: 11604
  source 1..203: mol_type = other DNA

SEQ ID NO: 32164 - DNA, 203 bp, synthetic construct; identical to SEQ ID NO: 11605
  source 1..203: mol_type = other DNA

SEQ ID NO: 32165 - DNA, 203 bp, synthetic construct; identical to SEQ ID NO: 11606
  source 1..203: mol_type = other DNA

SEQ ID NO: 32166 - DNA, 203 bp, synthetic construct; identical to SEQ ID NO: 11609
  source 1..203: mol_type = other DNA

SEQ ID NO: 32167 - DNA, 203 bp, synthetic construct; identical to SEQ ID NO: 11630
  source 1..203: mol_type = other DNA

SEQ ID NO: 32168 - DNA, 203 bp, synthetic construct; identical to SEQ ID NO: 11656
  source 1..203: mol_type = other DNA

SEQ ID NO: 32169 - DNA, 203 bp, synthetic construct; identical to SEQ ID NO: 11661
  source 1..203: mol_type = other DNA

SEQ ID NO: 32170 - DNA, 203 bp, synthetic construct; identical to SEQ ID NO: 11662
  source 1..203: mol_type = other DNA

SEQ ID NO: 32171 - DNA, 203 bp, synthetic construct; identical to SEQ ID NO: 11663
  source 1..203: mol_type = other DNA

SEQ ID NO: 32172 - DNA, 203 bp, synthetic construct; identical to SEQ ID NO: 11696
  source 1..203: mol_type = other DNA

SEQ ID NO: 32173 - DNA, 203 bp, synthetic construct; identical to SEQ ID NO: 11706
  source 1..203: mol_type = other DNA

SEQ ID NO: 32174 - DNA, 203 bp, synthetic construct; identical to SEQ ID NO: 11707
  source 1..203: mol_type = other DNA

SEQ ID NO: 32175 - DNA, 203 bp, synthetic construct; identical to SEQ ID NO: 11708
  source 1..203: mol_type = other DNA

SEQ ID NO: 32176 - DNA, 203 bp, synthetic construct; identical to SEQ ID NO: 11709
  source 1..203: mol_type = other DNA

SEQ ID NO: 32177 - DNA, 203 bp, synthetic construct; identical to SEQ ID NO: 11711
  source 1..203: mol_type = other DNA

SEQ ID NO: 32178 - DNA, 203 bp, synthetic construct; identical to SEQ ID NO: 11712
  source 1..203: mol_type = other DNA

SEQ ID NO: 32179 - DNA, 203 bp, synthetic construct; identical to SEQ ID NO: 11719
  source 1..203: mol_type = other DNA

SEQ ID NO: 32180 - DNA, 203 bp, synthetic construct; identical to SEQ ID NO: 11727
  source 1..203: mol_type = other DNA

SEQ ID NO: 32181 - DNA, 203 bp, synthetic construct; identical to SEQ ID NO: 11731
  source 1..203: mol_type = other DNA

SEQ ID NO: 32182 - DNA, 203 bp, synthetic construct; identical to SEQ ID NO: 11751
  source 1..203: mol_type = other DNA

SEQ ID NO: 32183 - DNA, 203 bp, synthetic construct; identical to SEQ ID NO: 11765
  source 1..203: mol_type = other DNA

SEQ ID NO: 32184 - DNA, 203 bp, synthetic construct; identical to SEQ ID NO: 11767
  source 1..203: mol_type = other DNA

SEQ ID NO: 32185 - DNA, 203 bp, synthetic construct; identical to SEQ ID NO: 11768
  source 1..203: mol_type = other DNA

SEQ ID NO: 32186 - DNA, 203 bp, synthetic construct; identical to SEQ ID NO: 11769
  source 1..203: mol_type = other DNA

SEQ ID NO: 32187 - DNA, 203 bp, synthetic construct; identical to SEQ ID NO: 11772
  source 1..203: mol_type = other DNA

SEQ ID NO: 32188 - DNA, 203 bp, synthetic construct; identical to SEQ ID NO: 11773
  source 1..203: mol_type = other DNA

SEQ ID NO: 32189 - DNA, 203 bp, synthetic construct; identical to SEQ ID NO: 11774
  source 1..203: mol_type = other DNA

SEQ ID NO: 32190 - DNA, 203 bp, synthetic construct; identical to SEQ ID NO: 11782
  source 1..203: mol_type = other DNA

SEQ ID NO: 32191 - DNA, 203 bp, synthetic construct; identical to SEQ ID NO: 11791
  source 1..203: mol_type = other DNA

SEQ ID NO: 32192 - DNA, 203 bp, synthetic construct; identical to SEQ ID NO: 11812
  source 1..203: mol_type = other DNA

SEQ ID NO: 32193 - DNA, 203 bp, synthetic construct; identical to SEQ ID NO: 11813
  source 1..203: mol_type = other DNA

SEQ ID NO: 32194 - DNA, 203 bp, synthetic construct; identical to SEQ ID NO: 11814
  source 1..203: mol_type = other DNA

SEQ ID NO: 32195 - DNA, 203 bp, synthetic construct; identical to SEQ ID NO: 11815
  source 1..203: mol_type = other DNA

SEQ ID NO: 32196 - DNA, 203 bp, synthetic construct; identical to SEQ ID NO: 11816
  source 1..203: mol_type = other DNA

SEQ ID NO: 32197 - DNA, 203 bp, synthetic construct; identical to SEQ ID NO: 11817
  source 1..203: mol_type = other DNA

SEQ ID NO: 32198 - DNA, 203 bp, synthetic construct; identical to SEQ ID NO: 11831
  source 1..203: mol_type = other DNA

SEQ ID NO: 32199 - DNA, 203 bp, synthetic construct; identical to SEQ ID NO: 11838
  source 1..203: mol_type = other DNA

SEQ ID NO: 32200 - DNA, 203 bp, synthetic construct; identical to SEQ ID NO: 11839
  source 1..203: mol_type = other DNA

SEQ ID NO: 32201 - DNA, 203 bp, synthetic construct; identical to SEQ ID NO: 11841
  source 1..203: mol_type = other DNA

SEQ ID NO: 32202 - DNA, 203 bp, synthetic construct; identical to SEQ ID NO: 11842
  source 1..203: mol_type = other DNA

SEQ ID NO: 32203 - DNA, 203 bp, synthetic construct; identical to SEQ ID NO: 11863
  source 1..203: mol_type = other DNA

SEQ ID NO: 32204 - DNA, 203 bp, synthetic construct; identical to SEQ ID NO: 11866
  source 1..203: mol_type = other DNA

SEQ ID NO: 32205 - DNA, 203 bp, synthetic construct; identical to SEQ ID NO: 11867
  source 1..203: mol_type = other DNA

SEQ ID NO: 32206 - DNA, 203 bp, synthetic construct; identical to SEQ ID NO: 11868
  source 1..203: mol_type = other DNA

SEQ ID NO: 32207 - DNA, 203 bp, synthetic construct; identical to SEQ ID NO: 11869
  source 1..203: mol_type = other DNA

SEQ ID NO: 32208 - DNA, 203 bp, synthetic construct; identical to SEQ ID NO: 11870
  source 1..203: mol_type = other DNA

SEQ ID NO: 32209 - DNA, 203 bp, synthetic construct; identical to SEQ ID NO: 11871
  source 1..203: mol_type = other DNA

SEQ ID NO: 32210 - DNA, 203 bp, synthetic construct; identical to SEQ ID NO: 11885
  source 1..203: mol_type = other DNA

SEQ ID NO: 32211 - DNA, 203 bp, synthetic construct; identical to SEQ ID NO: 11886
  source 1..203: mol_type = other DNA

SEQ ID NO: 32212 - DNA, 203 bp, synthetic construct; identical to SEQ ID NO: 11887
  source 1..203: mol_type = other DNA

SEQ ID NO: 32213 - DNA, 203 bp, synthetic construct; identical to SEQ ID NO: 11889
  source 1..203: mol_type = other DNA

SEQ ID NO: 32214 - DNA, 203 bp, synthetic construct; identical to SEQ ID NO: 11891
  source 1..203: mol_type = other DNA

SEQ ID NO: 32215 - DNA, 203 bp, synthetic construct; identical to SEQ ID NO: 11902
  source 1..203: mol_type = other DNA

SEQ ID NO: 32216 - DNA, 203 bp, synthetic construct; identical to SEQ ID NO: 11904
  source 1..203: mol_type = other DNA

SEQ ID NO: 32217 - DNA, 203 bp, synthetic construct; identical to SEQ ID NO: 11905
  source 1..203: mol_type = other DNA

SEQ ID NO: 32218 - DNA, 203 bp, synthetic construct; identical to SEQ ID NO: 11906
  source 1..203: mol_type = other DNA

SEQ ID NO: 32219 - DNA, 203 bp, synthetic construct; identical to SEQ ID NO: 11907
  source 1..203: mol_type = other DNA

SEQ ID NO: 32220 - DNA, 203 bp, synthetic construct; identical to SEQ ID NO: 11909
  source 1..203: mol_type = other DNA

SEQ ID NO: 32221 - DNA, 203 bp, synthetic construct; identical to SEQ ID NO: 11910
  source 1..203: mol_type = other DNA

SEQ ID NO: 32222 - DNA, 203 bp, synthetic construct; identical to SEQ ID NO: 11911
  source 1..203: mol_type = other DNA

SEQ ID NO: 32223 - DNA, 203 bp, synthetic construct; identical to SEQ ID NO: 11912
  source 1..203: mol_type = other DNA

SEQ ID NO: 32224 - DNA, 203 bp, synthetic construct; identical to SEQ ID NO: 11914
  source 1..203: mol_type = other DNA

SEQ ID NO: 32225 - DNA, 203 bp, synthetic construct; identical to SEQ ID NO: 11921
  source 1..203: mol_type = other DNA

SEQ ID NO: 32226 - DNA, 203 bp, synthetic construct; identical to SEQ ID NO: 11922
  source 1..203: mol_type = other DNA

SEQ ID NO: 32227 - DNA, 203 bp, synthetic construct; identical to SEQ ID NO: 11923
  source 1..203: mol_type = other DNA

SEQ ID NO: 32228 - DNA, 203 bp, synthetic construct; identical to SEQ ID NO: 11925
  source 1..203: mol_type = other DNA

SEQ ID NO: 32229 - DNA, 203 bp, synthetic construct; identical to SEQ ID NO: 11926
  source 1..203: mol_type = other DNA

SEQ ID NO: 32230 - DNA, 203 bp, synthetic construct; identical to SEQ ID NO: 11927
  source 1..203: mol_type = other DNA

SEQ ID NO: 32231 - DNA, 203 bp, synthetic construct; identical to SEQ ID NO: 11956
  source 1..203: mol_type = other DNA

SEQ ID NO: 32232 - DNA, 203 bp, synthetic construct; identical to SEQ ID NO: 11957
  source 1..203: mol_type = other DNA

SEQ ID NO: 32233 - DNA, 203 bp, synthetic construct; identical to SEQ ID NO: 11958
  source 1..203: mol_type = other DNA

SEQ ID NO: 32234 - DNA, 203 bp, synthetic construct; identical to SEQ ID NO: 11964
  source 1..203: mol_type = other DNA

SEQ ID NO: 32235 - DNA, 203 bp, synthetic construct; identical to SEQ ID NO: 11992
  source 1..203: mol_type = other DNA

SEQ ID NO: 32236 - DNA, 203 bp, synthetic construct; identical to SEQ ID NO: 11994
  source 1..203: mol_type = other DNA

SEQ ID NO: 32237 - DNA, 203 bp, synthetic construct; identical to SEQ ID NO: 11995
  source 1..203: mol_type = other DNA

SEQ ID NO: 32238 - DNA, 203 bp, synthetic construct; identical to SEQ ID NO: 11996
  source 1..203: mol_type = other DNA

SEQ ID NO: 32239 - DNA, 203 bp, synthetic construct; identical to SEQ ID NO: 11997
  source 1..203: mol_type = other DNA

SEQ ID NO: 32240 - DNA, 203 bp, synthetic construct; identical to SEQ ID NO: 11998
  source 1..203: mol_type = other DNA

SEQ ID NO: 32241 - DNA, 203 bp, synthetic construct; identical to SEQ ID NO: 12000
  source 1..203: mol_type = other DNA

SEQ ID NO: 32242 - DNA, 203 bp, synthetic construct; identical to SEQ ID NO: 12001
  source 1..203: mol_type = other DNA

SEQ ID NO: 32243 - DNA, 203 bp, synthetic construct; identical to SEQ ID NO: 12012
  source 1..203: mol_type = other DNA

SEQ ID NO: 32244 - DNA, 203 bp, synthetic construct; identical to SEQ ID NO: 12018
  source 1..203: mol_type = other DNA

SEQ ID NO: 32245 - DNA, 203 bp, synthetic construct; identical to SEQ ID NO: 12021
  source 1..203: mol_type = other DNA

SEQ ID NO: 32246 - DNA, 203 bp, synthetic construct; identical to SEQ ID NO: 12022
  source 1..203: mol_type = other DNA

SEQ ID NO: 32247 - DNA, 203 bp, synthetic construct; identical to SEQ ID NO: 12023
  source 1..203: mol_type = other DNA

SEQ ID NO: 32248 - DNA, 203 bp, synthetic construct; identical to SEQ ID NO: 12024
  source 1..203: mol_type = other DNA

SEQ ID NO: 32249 - DNA, 203 bp, synthetic construct; identical to SEQ ID NO: 12025
  source 1..203: mol_type = other DNA

SEQ ID NO: 32250 - DNA, 203 bp, synthetic construct; identical to SEQ ID NO: 12044
  source 1..203: mol_type = other DNA

SEQ ID NO: 32251 - DNA, 203 bp, synthetic construct; identical to SEQ ID NO: 12067
  source 1..203: mol_type = other DNA

SEQ ID NO: 32252 - DNA, 203 bp, synthetic construct; identical to SEQ ID NO: 12069
  source 1..203: mol_type = other DNA

SEQ ID NO: 32253 - DNA, 203 bp, synthetic construct; identical to SEQ ID NO: 12070
  source 1..203: mol_type = other DNA

SEQ ID NO: 32254 - DNA, 203 bp, synthetic construct; identical to SEQ ID NO: 12071
  source 1..203: mol_type = other DNA

SEQ ID NO: 32255 - DNA, 203 bp, synthetic construct; identical to SEQ ID NO: 12078
  source 1..203: mol_type = other DNA

SEQ ID NO: 32256 - DNA, 203 bp, synthetic construct; identical to SEQ ID NO: 12079
  source 1..203: mol_type = other DNA

SEQ ID NO: 32257 - DNA, 203 bp, synthetic construct; identical to SEQ ID NO: 12081
  source 1..203: mol_type = other DNA

SEQ ID NO: 32258 - DNA, 203 bp, synthetic construct; identical to SEQ ID NO: 12082
  source 1..203: mol_type = other DNA

SEQ ID NO: 32259 - DNA, 203 bp, synthetic construct; identical to SEQ ID NO: 12088
  source 1..203: mol_type = other DNA

SEQ ID NO: 32260 - DNA, 203 bp, synthetic construct; identical to SEQ ID NO: 12089
  source 1..203: mol_type = other DNA

SEQ ID NO: 32261 - DNA, 203 bp, synthetic construct; identical to SEQ ID NO: 12091
  source 1..203: mol_type = other DNA

SEQ ID NO: 32262 - DNA, 203 bp, synthetic construct; identical to SEQ ID NO: 12097
  source 1..203: mol_type = other DNA

SEQ ID NO: 32263 - DNA, 203 bp, synthetic construct; identical to SEQ ID NO: 12099
  source 1..203: mol_type = other DNA

SEQ ID NO: 32264 - DNA, 203 bp, synthetic construct; identical to SEQ ID NO: 12154
  source 1..203: mol_type = other DNA

SEQ ID NO: 32265 - DNA, 203 bp, synthetic construct; identical to SEQ ID NO: 12181
  source 1..203: mol_type = other DNA

SEQ ID NO: 32266 - DNA, 203 bp, synthetic construct; identical to SEQ ID NO: 12183
  source 1..203: mol_type = other DNA

SEQ ID NO: 32267 - DNA, 203 bp, synthetic construct; identical to SEQ ID NO: 12184
  source 1..203: mol_type = other DNA

SEQ ID NO: 32268 - DNA, 203 bp, synthetic construct; identical to SEQ ID NO: 12185
  source 1..203: mol_type = other DNA

SEQ ID NO: 32269 - DNA, 203 bp, synthetic construct; identical to SEQ ID NO: 12186
  source 1..203: mol_type = other DNA

SEQ ID NO: 32270 - DNA, 203 bp, synthetic construct; identical to SEQ ID NO: 12196
  source 1..203: mol_type = other DNA

SEQ ID NO: 32271 - DNA, 203 bp, synthetic construct; identical to SEQ ID NO: 12197
  source 1..203: mol_type = other DNA

SEQ ID NO: 32272 - DNA, 203 bp, synthetic construct; identical to SEQ ID NO: 12207
  source 1..203: mol_type = other DNA

SEQ ID NO: 32273 - DNA, 203 bp, synthetic construct; identical to SEQ ID NO: 12210
  source 1..203: mol_type = other DNA

SEQ ID NO: 32274 - DNA, 203 bp, synthetic construct; identical to SEQ ID NO: 12211
  source 1..203: mol_type = other DNA

SEQ ID NO: 32275 - DNA, 203 bp, synthetic construct; identical to SEQ ID NO: 12212
  source 1..203: mol_type = other DNA

SEQ ID NO: 32276 - DNA, 203 bp, synthetic construct; identical to SEQ ID NO: 12213
  source 1..203: mol_type = other DNA

SEQ ID NO: 32277 - DNA, 203 bp, synthetic construct; identical to SEQ ID NO: 12215
  source 1..203: mol_type = other DNA

SEQ ID NO: 32278 - DNA, 203 bp, synthetic construct; identical to SEQ ID NO: 12217
  source 1..203: mol_type = other DNA

SEQ ID NO: 32279 - DNA, 203 bp, synthetic construct; identical to SEQ ID NO: 12220
  source 1..203: mol_type = other DNA

SEQ ID NO: 32280 - DNA, 203 bp, synthetic construct; identical to SEQ ID NO: 12221
  source 1..203: mol_type = other DNA

SEQ ID NO: 32281 - DNA, 203 bp, synthetic construct; identical to SEQ ID NO: 12222
  source 1..203: mol_type = other DNA

SEQ ID NO: 32282 - DNA, 203 bp, synthetic construct; identical to SEQ ID NO: 12224
  source 1..203: mol_type = other DNA

SEQ ID NO: 32283 - DNA, 203 bp, synthetic construct; identical to SEQ ID NO: 12225
  source 1..203: mol_type = other DNA

SEQ ID NO: 32284 - DNA, 203 bp, synthetic construct; identical to SEQ ID NO: 12226
  source 1..203: mol_type = other DNA

SEQ ID NO: 32285 - DNA, 203 bp, synthetic construct; identical to SEQ ID NO: 12227
  source 1..203: mol_type = other DNA

SEQ ID NO: 32286 - DNA, 203 bp, synthetic construct; identical to SEQ ID NO: 12232
  source 1..203: mol_type = other DNA

SEQ ID NO: 32287 - DNA, 203 bp, synthetic construct; identical to SEQ ID NO: 12233
  source 1..203: mol_type = other DNA

SEQ ID NO: 32288 - DNA, 203 bp, synthetic construct; identical to SEQ ID NO: 12235
  source 1..203: mol_type = other DNA

SEQ ID NO: 32289 - DNA, 203 bp, synthetic construct; identical to SEQ ID NO: 12236
  source 1..203: mol_type = other DNA

SEQ ID NO: 32290 - DNA, 203 bp, synthetic construct; identical to SEQ ID NO: 12273
  source 1..203: mol_type = other DNA

SEQ ID NO: 32291 - DNA, 203 bp, synthetic construct; identical to SEQ ID NO: 12280
  source 1..203: mol_type = other DNA

SEQ ID NO: 32292 - DNA, 203 bp, synthetic construct; identical to SEQ ID NO: 12281
  source 1..203: mol_type = other DNA

SEQ ID NO: 32293 - DNA, 203 bp, synthetic construct; identical to SEQ ID NO: 12282
  source 1..203: mol_type = other DNA

SEQ ID NO: 32294 - DNA, 203 bp, synthetic construct; identical to SEQ ID NO: 12283
  source 1..203: mol_type = other DNA

SEQ ID NO: 32295 - DNA, 203 bp, synthetic construct; identical to SEQ ID NO: 12294
  source 1..203: mol_type = other DNA

SEQ ID NO: 32296 - DNA, 203 bp, synthetic construct; identical to SEQ ID NO: 12295
  source 1..203: mol_type = other DNA

SEQ ID NO: 32297 - DNA, 203 bp, synthetic construct; identical to SEQ ID NO: 12306
  source 1..203: mol_type = other DNA

SEQ ID NO: 32298 - DNA, 203 bp, synthetic construct; identical to SEQ ID NO: 12307
  source 1..203: mol_type = other DNA

SEQ ID NO: 32299 - DNA, 203 bp, synthetic construct; identical to SEQ ID NO: 12309
  source 1..203: mol_type = other DNA

SEQ ID NO: 32300 - DNA, 203 bp, synthetic construct; identical to SEQ ID NO: 12310
  source 1..203: mol_type = other DNA

SEQ ID NO: 32301 - DNA, 203 bp, synthetic construct; identical to SEQ ID NO: 12312
  source 1..203: mol_type = other DNA

SEQ ID NO: 32302 - DNA, 203 bp, synthetic construct; identical to SEQ ID NO: 12331
  source 1..203: mol_type = other DNA

SEQ ID NO: 32303 - DNA, 203 bp, synthetic construct; identical to SEQ ID NO: 12333
  source 1..203: mol_type = other DNA

SEQ ID NO: 32304 - DNA, 203 bp, synthetic construct; identical to SEQ ID NO: 12345
  source 1..203: mol_type = other DNA

SEQ ID NO: 32305 - DNA, 203 bp, synthetic construct; identical to SEQ ID NO: 12346
  source 1..203: mol_type = other DNA

SEQ ID NO: 32306 - DNA, 203 bp, synthetic construct; identical to SEQ ID NO: 12353
  source 1..203: mol_type = other DNA

SEQ ID NO: 32307 - DNA, 203 bp, synthetic construct; identical to SEQ ID NO: 12354
  source 1..203: mol_type = other DNA

SEQ ID NO: 32308 - DNA, 203 bp, synthetic construct; identical to SEQ ID NO: 12366
  source 1..203: mol_type = other DNA

SEQ ID NO: 32309 - DNA, 203 bp, synthetic construct; identical to SEQ ID NO: 12371
  source 1..203: mol_type = other DNA

SEQ ID NO: 32310 - DNA, 203 bp, synthetic construct; identical to SEQ ID NO: 12382
  source 1..203: mol_type = other DNA

SEQ ID NO: 32311 - DNA, 203 bp, synthetic construct; identical to SEQ ID NO: 12390
  source 1..203: mol_type = other DNA

SEQ ID NO: 32312 - DNA, 203 bp, synthetic construct; identical to SEQ ID NO: 12395
  source 1..203: mol_type = other DNA

SEQ ID NO: 32313 - DNA, 203 bp, synthetic construct; identical to SEQ ID NO: 12398
  source 1..203: mol_type = other DNA

SEQ ID NO: 32314 - DNA, 203 bp, synthetic construct; identical to SEQ ID NO: 12404
  source 1..203: mol_type = other DNA

SEQ ID NO: 32315 - DNA, 203 bp, synthetic construct; identical to SEQ ID NO: 12406
  source 1..203: mol_type = other DNA

SEQ ID NO: 32316 - DNA, 203 bp, synthetic construct; identical to SEQ ID NO: 12409
  source 1..203: mol_type = other DNA

SEQ ID NO: 32317 - DNA, 203 bp, synthetic construct; identical to SEQ ID NO: 12410
  source 1..203: mol_type = other DNA

SEQ ID NO: 32318 - DNA, 203 bp, synthetic construct; identical to SEQ ID NO: 12411
  source 1..203: mol_type = other DNA

SEQ ID NO: 32319 - DNA, 203 bp, synthetic construct; identical to SEQ ID NO: 12421
  source 1..203: mol_type = other DNA

SEQ ID NO: 32320 - DNA, 203 bp, synthetic construct; identical to SEQ ID NO: 12422
  source 1..203: mol_type = other DNA

SEQ ID NO: 32321 - DNA, 203 bp, synthetic construct; identical to SEQ ID NO: 12423
  source 1..203: mol_type = other DNA

SEQ ID NO: 32322 - DNA, 203 bp, synthetic construct; identical to SEQ ID NO: 12425
  source 1..203: mol_type = other DNA

SEQ ID NO: 32323 - DNA, 203 bp, synthetic construct; identical to SEQ ID NO: 12426
  source 1..203: mol_type = other DNA

SEQ ID NO: 32324 - DNA, 203 bp, synthetic construct; identical to SEQ ID NO: 12427
  source 1..203: mol_type = other DNA

SEQ ID NO: 32325 - DNA, 203 bp, synthetic construct; identical to SEQ ID NO: 12428
  source 1..203: mol_type = other DNA

SEQ ID NO: 32326 - DNA, 203 bp, synthetic construct; identical to SEQ ID NO: 12453
  source 1..203: mol_type = other DNA

SEQ ID NO: 32327 - DNA, 203 bp, synthetic construct; identical to SEQ ID NO: 12454
  source 1..203: mol_type = other DNA

SEQ ID NO: 32328 - DNA, 203 bp, synthetic construct; identical to SEQ ID NO: 12466
  source 1..203: mol_type = other DNA

SEQ ID NO: 32329 - DNA, 203 bp, synthetic construct; identical to SEQ ID NO: 12467
  source 1..203: mol_type = other DNA

SEQ ID NO: 32330 - DNA, 203 bp, synthetic construct; identical to SEQ ID NO: 12468
  source 1..203: mol_type = other DNA

SEQ ID NO: 32331 - DNA, 203 bp, synthetic construct; identical to SEQ ID NO: 12469
  source 1..203: mol_type = other DNA

SEQ ID NO: 32332 - DNA, 203 bp, synthetic construct; identical to SEQ ID NO: 12470
  source 1..203: mol_type = other DNA

SEQ ID NO: 32333 - DNA, 203 bp, synthetic construct; identical to SEQ ID NO: 12473
  source 1..203: mol_type = other DNA

SEQ ID NO: 32334 - DNA, 203 bp, synthetic construct; identical to SEQ ID NO: 12474
  source 1..203: mol_type = other DNA

SEQ ID NO: 32335 - DNA, 203 bp, synthetic construct; identical to SEQ ID NO: 12486
  source 1..203: mol_type = other DNA

SEQ ID NO: 32336 - DNA, 203 bp, synthetic construct; identical to SEQ ID NO: 12496
  source 1..203: mol_type = other DNA

SEQ ID NO: 32337 - DNA, 203 bp, synthetic construct; identical to SEQ ID NO: 12497
  source 1..203: mol_type = other DNA

SEQ ID NO: 32338 - DNA, 203 bp, synthetic construct; identical to SEQ ID NO: 12499
  source 1..203: mol_type = other DNA

SEQ ID NO: 32339 - DNA, 203 bp, synthetic construct; identical to SEQ ID NO: 12500
  source 1..203: mol_type = other DNA

SEQ ID NO: 32340 - DNA, 203 bp, synthetic construct; identical to SEQ ID NO: 12518
  source 1..203: mol_type = other DNA

SEQ ID NO: 32341 - DNA, 203 bp, synthetic construct; identical to SEQ ID NO: 12519
  source 1..203: mol_type = other DNA

SEQ ID NO: 32342 - DNA, 203 bp, synthetic construct; identical to SEQ ID NO: 12520
  source 1..203: mol_type = other DNA

SEQ ID NO: 32343 - DNA, 203 bp, synthetic construct; identical to SEQ ID NO: 12521
  source 1..203: mol_type = other DNA

SEQ ID NO: 32344 - DNA, 203 bp, synthetic construct; identical to SEQ ID NO: 12523
  source 1..203: mol_type = other DNA

SEQ ID NO: 32345 - DNA, 203 bp, synthetic construct; identical to SEQ ID NO: 12524
  source 1..203: mol_type = other DNA

SEQ ID NO: 32346 - DNA, 203 bp, synthetic construct; identical to SEQ ID NO: 12525
  source 1..203: mol_type = other DNA

SEQ ID NO: 32347 - DNA, 203 bp, synthetic construct; identical to SEQ ID NO: 12546
  source 1..203: mol_type = other DNA

SEQ ID NO: 32348 - DNA, 203 bp, synthetic construct; identical to SEQ ID NO: 12548
  source 1..203: mol_type = other DNA

SEQ ID NO: 32349 - DNA, 203 bp, synthetic construct; identical to SEQ ID NO: 12549
  source 1..203: mol_type = other DNA

SEQ ID NO: 32350 - DNA, 203 bp, synthetic construct; identical to SEQ ID NO: 12550
  source 1..203: mol_type = other DNA

SEQ ID NO: 32351 - DNA, 203 bp, synthetic construct; identical to SEQ ID NO: 12551
  source 1..203: mol_type = other DNA

SEQ ID NO: 32352 - DNA, 203 bp, synthetic construct; identical to SEQ ID NO: 12593
  source 1..203: mol_type = other DNA

SEQ ID NO: 32353 - DNA, 203 bp, synthetic construct; identical to SEQ ID NO: 12594
  source 1..203: mol_type = other DNA

SEQ ID NO: 32354 - DNA, 203 bp, synthetic construct; identical to SEQ ID NO: 12601
  source 1..203: mol_type = other DNA

SEQ ID NO: 32355 - DNA, 203 bp, synthetic construct; identical to SEQ ID NO: 12624
  source 1..203: mol_type = other DNA

SEQ ID NO: 32356 - DNA, 203 bp, synthetic construct; identical to SEQ ID NO: 12626
  source 1..203: mol_type = other DNA

SEQ ID NO: 32357 - DNA, 203 bp, synthetic construct; identical to SEQ ID NO: 12627
  source 1..203: mol_type = other DNA

SEQ ID NO: 32358 - DNA, 203 bp, synthetic construct; identical to SEQ ID NO: 12628
  source 1..203: mol_type = other DNA

SEQ ID NO: 32359 - DNA, 203 bp, synthetic construct; identical to SEQ ID NO: 12630
  source 1..203: mol_type = other DNA

SEQ ID NO: 32360 - DNA, 203 bp, synthetic construct; identical to SEQ ID NO: 12631
  source 1..203: mol_type = other DNA

SEQ ID NO: 32361 - DNA, 203 bp, synthetic construct; identical to SEQ ID NO: 12632
  source 1..203: mol_type = other DNA

SEQ ID NO: 32362 - DNA, 203 bp, synthetic construct; identical to SEQ ID NO: 12634
  source 1..203: mol_type = other DNA

SEQ ID NO: 32363 - DNA, 203 bp, synthetic construct; identical to SEQ ID NO: 12635
  source 1..203: mol_type = other DNA

SEQ ID NO: 32364 - DNA, 203 bp, synthetic construct; identical to SEQ ID NO: 12637
  source 1..203: mol_type = other DNA

SEQ ID NO: 32365 - DNA, 203 bp, synthetic construct; identical to SEQ ID NO: 12638
  source 1..203: mol_type = other DNA

SEQ ID NO: 32366 - DNA, 203 bp, synthetic construct; identical to SEQ ID NO: 12640
  source 1..203: mol_type = other DNA

SEQ ID NO: 32367 - DNA, 203 bp, synthetic construct; identical to SEQ ID NO: 12641
  source 1..203: mol_type = other DNA

SEQ ID NO: 32368 - DNA, 203 bp, synthetic construct; identical to SEQ ID NO: 12643
  source 1..203: mol_type = other DNA

SEQ ID NO: 32369 - DNA, 203 bp, synthetic construct; identical to SEQ ID NO: 12644
  source 1..203: mol_type = other DNA

SEQ ID NO: 32370 - DNA, 203 bp, synthetic construct; identical to SEQ ID NO: 12645
  source 1..203: mol_type = other DNA

SEQ ID NO: 32371 - DNA, 203 bp, synthetic construct; identical to SEQ ID NO: 12646
  source 1..203: mol_type = other DNA

SEQ ID NO: 32372 - DNA, 203 bp, synthetic construct; identical to SEQ ID NO: 12675
  source 1..203: mol_type = other DNA

SEQ ID NO: 32373 - DNA, 203 bp, synthetic construct; identical to SEQ ID NO: 12677
  source 1..203: mol_type = other DNA

SEQ ID NO: 32374 - DNA, 203 bp, synthetic construct; identical to SEQ ID NO: 12678
  source 1..203: mol_type = other DNA

SEQ ID NO: 32375 - DNA, 203 bp, synthetic construct; identical to SEQ ID NO: 12679
  source 1..203: mol_type = other DNA

SEQ ID NO: 32376 - DNA, 203 bp, synthetic construct; identical to SEQ ID NO: 12689
  source 1..203: mol_type = other DNA

SEQ ID NO: 32377 - DNA, 203 bp, synthetic construct; identical to SEQ ID NO: 12690
  source 1..203: mol_type = other DNA

SEQ ID NO: 32378 - DNA, 203 bp, synthetic construct; identical to SEQ ID NO: 12691
  source 1..203: mol_type = other DNA

SEQ ID NO: 32379 - DNA, 203 bp, synthetic construct; identical to SEQ ID NO: 12702
  source 1..203: mol_type = other DNA

SEQ ID NO: 32380 - DNA, 203 bp, synthetic construct; identical to SEQ ID NO: 12703
  source 1..203: mol_type = other DNA

SEQ ID NO: 32381 - DNA, 203 bp, synthetic construct; identical to SEQ ID NO: 12705
  source 1..203: mol_type = other DNA

SEQ ID NO: 32382 - DNA, 203 bp, synthetic construct; identical to SEQ ID NO: 12707
  source 1..203: mol_type = other DNA

SEQ ID NO: 32383 - DNA, 203 bp, synthetic construct; identical to SEQ ID NO: 12708
  source 1..203: mol_type = other DNA

SEQ ID NO: 32384 - DNA, 203 bp, synthetic construct; identical to SEQ ID NO: 12709
  source 1..203: mol_type = other DNA

SEQ ID NO: 32385 - DNA, 203 bp, synthetic construct; identical to SEQ ID NO: 12725
  source 1..203: mol_type = other DNA

SEQ ID NO: 32386 - DNA, 203 bp, synthetic construct; identical to SEQ ID NO: 12726
  source 1..203: mol_type = other DNA

SEQ ID NO: 32387 - DNA, 203 bp, synthetic construct; identical to SEQ ID NO: 12727
  source 1..203: mol_type = other DNA

SEQ ID NO: 32388 - DNA, 203 bp, synthetic construct; identical to SEQ ID NO: 12737
  source 1..203: mol_type = other DNA

SEQ ID NO: 32389 - DNA, 203 bp, synthetic construct; identical to SEQ ID NO: 12739
  source 1..203: mol_type = other DNA

SEQ ID NO: 32390 - DNA, 203 bp, synthetic construct; identical to SEQ ID NO: 12740
  source 1..203: mol_type = other DNA

SEQ ID NO: 32391 - DNA, 203 bp, synthetic construct; identical to SEQ ID NO: 12741
  source 1..203: mol_type = other DNA

SEQ ID NO: 32392 - DNA, 203 bp, synthetic construct; identical to SEQ ID NO: 12744
  source 1..203: mol_type = other DNA

SEQ ID NO: 32393 - DNA, 203 bp, synthetic construct; identical to SEQ ID NO: 12758
  source 1..203: mol_type = other DNA

SEQ ID NO: 32394 - DNA, 203 bp, synthetic construct; identical to SEQ ID NO: 12759
  source 1..203: mol_type = other DNA

SEQ ID NO: 32395 - DNA, 203 bp, synthetic construct; identical to SEQ ID NO: 12762
  source 1..203: mol_type = other DNA

SEQ ID NO: 32396 - DNA, 203 bp, synthetic construct; identical to SEQ ID NO: 12781
  source 1..203: mol_type = other DNA

SEQ ID NO: 32397 - DNA, 203 bp, synthetic construct; identical to SEQ ID NO: 12782
  source 1..203: mol_type = other DNA

SEQ ID NO: 32398 - DNA, 203 bp, synthetic construct; identical to SEQ ID NO: 12783
  source 1..203: mol_type = other DNA

SEQ ID NO: 32399 - DNA, 203 bp, synthetic construct; identical to SEQ ID NO: 12785
  source 1..203: mol_type = other DNA

SEQ ID NO: 32400 - DNA, 203 bp, synthetic construct; identical to SEQ ID NO: 12802
  source 1..203: mol_type = other DNA

SEQ ID NO: 32401 - DNA, 203 bp, synthetic construct; identical to SEQ ID NO: 12803
  source 1..203: mol_type = other DNA

SEQ ID NO: 32402 - DNA, 203 bp, synthetic construct; identical to SEQ ID NO: 12804
  source 1..203: mol_type = other DNA

SEQ ID NO: 32403 - DNA, 203 bp, synthetic construct; identical to SEQ ID NO: 12806
  source 1..203: mol_type = other DNA

SEQ ID NO: 32404 - DNA, 203 bp, synthetic construct; identical to SEQ ID NO: 12817
  source 1..203: mol_type = other DNA

SEQ ID NO: 32405 - DNA, 203 bp, synthetic construct; identical to SEQ ID NO: 12818
  source 1..203: mol_type = other DNA

SEQ ID NO: 32406 - DNA, 203 bp, synthetic construct; identical to SEQ ID NO: 12825
  source 1..203: mol_type = other DNA

SEQ ID NO: 32407 - DNA, 203 bp, synthetic construct; identical to SEQ ID NO: 12847
  source 1..203: mol_type = other DNA

SEQ ID NO: 32408 - DNA, 203 bp, synthetic construct; identical to SEQ ID NO: 12850
  source 1..203: mol_type = other DNA

SEQ ID NO: 32409 - DNA, 203 bp, synthetic construct; identical to SEQ ID NO: 12851
  source 1..203: mol_type = other DNA

SEQ ID NO: 32410 - DNA, 203 bp, synthetic construct; identical to SEQ ID NO: 12857
  source 1..203: mol_type = other DNA

SEQ ID NO: 32411 - DNA, 203 bp, synthetic construct; identical to SEQ ID NO: 12858
  source 1..203: mol_type = other DNA

SEQ ID NO: 32412 - DNA, 203 bp, synthetic construct; identical to SEQ ID NO: 12859
  source 1..203: mol_type = other DNA

SEQ ID NO: 32413 - DNA, 203 bp, synthetic construct; identical to SEQ ID NO: 12860
  source 1..203: mol_type = other DNA

SEQ ID NO: 32414 - DNA, 203 bp, synthetic construct; identical to SEQ ID NO: 12862
  source 1..203: mol_type = other DNA

SEQ ID NO: 32415 - DNA, 203 bp, synthetic construct; identical to SEQ ID NO: 12863
  source 1..203: mol_type = other DNA

SEQ ID NO: 32416 - DNA, 203 bp, synthetic construct; identical to SEQ ID NO: 12864
  source 1..203: mol_type = other DNA

SEQ ID NO: 32417 - DNA, 203 bp, synthetic construct; identical to SEQ ID NO: 12872
  source 1..203: mol_type = other DNA

SEQ ID NO: 32418 - DNA, 203 bp, synthetic construct; identical to SEQ ID NO: 12887
  source 1..203: mol_type = other DNA

SEQ ID NO: 32419 - DNA, 203 bp, synthetic construct; identical to SEQ ID NO: 12894
  source 1..203: mol_type = other DNA

SEQ ID NO: 32420 - DNA, 203 bp, synthetic construct; identical to SEQ ID NO: 12901
  source 1..203: mol_type = other DNA

SEQ ID NO: 32421 - DNA, 203 bp, synthetic construct; identical to SEQ ID NO: 12906
  source 1..203: mol_type = other DNA

SEQ ID NO: 32422 - DNA, 203 bp, synthetic construct; identical to SEQ ID NO: 12919
  source 1..203: mol_type = other DNA

SEQ ID NO: 32423 - DNA, 203 bp, synthetic construct; identical to SEQ ID NO: 12940
  source 1..203: mol_type = other DNA

SEQ ID NO: 32424 - DNA, 203 bp, synthetic construct; identical to SEQ ID NO: 12941
  source 1..203: mol_type = other DNA

SEQ ID NO: 32425 - DNA, 203 bp, synthetic construct; identical to SEQ ID NO: 12948
  source 1..203: mol_type = other DNA

SEQ ID NO: 32426 - DNA, 203 bp, synthetic construct; identical to SEQ ID NO: 12950
  source 1..203: mol_type = other DNA

SEQ ID NO: 32427 - DNA, 203 bp, synthetic construct; identical to SEQ ID NO: 12951
  source 1..203: mol_type = other DNA

SEQ ID NO: 32428 - DNA, 203 bp, synthetic construct; identical to SEQ ID NO: 12952
  source 1..203: mol_type = other DNA

SEQ ID NO: 32429 - DNA, 203 bp, synthetic construct; identical to SEQ ID NO: 12953
  source 1..203: mol_type = other DNA

SEQ ID NO: 32430 - DNA, 203 bp, synthetic construct; identical to SEQ ID NO: 12954
  source 1..203: mol_type = other DNA

SEQ ID NO: 32431 - DNA, 203 bp, synthetic construct; identical to SEQ ID NO: 12955
  source 1..203: mol_type = other DNA

SEQ ID NO: 32432 - DNA, 203 bp, synthetic construct; identical to SEQ ID NO: 12956
  source 1..203: mol_type = other DNA

SEQ ID NO: 32433 - DNA, 203 bp, synthetic construct; identical to SEQ ID NO: 12957
  source 1..203: mol_type = other DNA

SEQ ID NO: 32434 - DNA, 203 bp, synthetic construct; identical to SEQ ID NO: 12958
  source 1..203: mol_type = other DNA

SEQ ID NO: 32435 - DNA, 203 bp, synthetic construct; identical to SEQ ID NO: 12959
  source 1..203: mol_type = other DNA

SEQ ID NO: 32436 - DNA, 203 bp, synthetic construct; identical to SEQ ID NO: 12961
  source 1..203: mol_type = other DNA

SEQ ID NO: 32437 - DNA, 203 bp, synthetic construct; identical to SEQ ID NO: 12964
  source 1..203: mol_type = other DNA

SEQ ID NO: 32438 - DNA, 203 bp, synthetic construct; identical to SEQ ID NO: 12965
  source 1..203: mol_type = other DNA

SEQ ID NO: 32439 - DNA, 203 bp, synthetic construct; identical to SEQ ID NO: 12968
  source 1..203: mol_type = other DNA

SEQ ID NO: 32440 - DNA, 203 bp, synthetic construct; identical to SEQ ID NO: 12972
  source 1..203: mol_type = other DNA

SEQ ID NO: 32441 - DNA, 203 bp, synthetic construct; identical to SEQ ID NO: 12993
  source 1..203: mol_type = other DNA

SEQ ID NO: 32442 - DNA, 203 bp, synthetic construct; identical to SEQ ID NO: 12995
  source 1..203: mol_type = other DNA

SEQ ID NO: 32443 - DNA, 203 bp, synthetic construct; identical to SEQ ID NO: 12996
  source 1..203: mol_type = other DNA

SEQ ID NO: 32444 - DNA, 203 bp, synthetic construct; identical to SEQ ID NO: 12997
  source 1..203: mol_type = other DNA

SEQ ID NO: 32445 - DNA, 203 bp, synthetic construct; identical to SEQ ID NO: 13005
  source 1..203: mol_type = other DNA

SEQ ID NO: 32446 - DNA, 203 bp, synthetic construct; identical to SEQ ID NO: 13009
  source 1..203: mol_type = other DNA

SEQ ID NO: 32447 - DNA, 203 bp, synthetic construct; identical to SEQ ID NO: 13010
  source 1..203: mol_type = other DNA

SEQ ID NO: 32448 - DNA, 203 bp, synthetic construct; identical to SEQ ID NO: 13011
  source 1..203: mol_type = other DNA

SEQ ID NO: 32449 - DNA, 203 bp, synthetic construct; identical to SEQ ID NO: 13025
  source 1..203: mol_type = other DNA

SEQ ID NO: 32450 - DNA, 203 bp, synthetic construct; identical to SEQ ID NO: 13028
  source 1..203: mol_type = other DNA

SEQ ID NO: 32451 - DNA, 203 bp, synthetic construct; identical to SEQ ID NO: 13029
  source 1..203: mol_type = other DNA

SEQ ID NO: 32452 - DNA, 203 bp, synthetic construct; identical to SEQ ID NO: 13033
  source 1..203: mol_type = other DNA

SEQ ID NO: 32453 - DNA, 203 bp, synthetic construct; identical to SEQ ID NO: 13034
  source 1..203: mol_type = other DNA

SEQ ID NO: 32454 - DNA, 203 bp, synthetic construct; identical to SEQ ID NO: 13035
  source 1..203: mol_type = other DNA

SEQ ID NO: 32455 - DNA, 203 bp, synthetic construct; identical to SEQ ID NO: 13036
  source 1..203: mol_type = other DNA

SEQ ID NO: 32456 - DNA, 203 bp, synthetic construct; identical to SEQ ID NO: 13056
  source 1..203: mol_type = other DNA

SEQ ID NO: 32457 - DNA, 203 bp, synthetic construct; identical to SEQ ID NO: 13077
  source 1..203: mol_type = other DNA

SEQ ID NO: 32458 - DNA, 203 bp, synthetic construct; identical to SEQ ID NO: 13078
  source 1..203: mol_type = other DNA

SEQ ID NO: 32459 - DNA, 203 bp, synthetic construct; identical to SEQ ID NO: 13083
  source 1..203: mol_type = other DNA

SEQ ID NO: 32460 - DNA, 203 bp, synthetic construct; identical to SEQ ID NO: 13090
  source 1..203: mol_type = other DNA

SEQ ID NO: 32461 - DNA, 203 bp, synthetic construct; identical to SEQ ID NO: 13152
  source 1..203: mol_type = other DNA

SEQ ID NO: 32462 - DNA, 203 bp, synthetic construct; identical to SEQ ID NO: 13160
  source 1..203: mol_type = other DNA

SEQ ID NO: 32463 - DNA, 203 bp, synthetic construct; identical to SEQ ID NO: 13173
  source 1..203: mol_type = other DNA

SEQ ID NO: 32464 - DNA, 203 bp, synthetic construct; identical to SEQ ID NO: 13175
  source 1..203: mol_type = other DNA

SEQ ID NO: 32465 - DNA, 203 bp, synthetic construct; identical to SEQ ID NO: 13176
  source 1..203: mol_type = other DNA

SEQ ID NO: 32466 - DNA, 203 bp, synthetic construct; identical to SEQ ID NO: 13177
  source 1..203: mol_type = other DNA

SEQ ID NO: 32467 - DNA, 203 bp, synthetic construct; identical to SEQ ID NO: 13178
  source 1..203: mol_type = other DNA

SEQ ID NO: 32468 - DNA, 203 bp, synthetic construct; identical to SEQ ID NO: 13179
  source 1..203: mol_type = other DNA

SEQ ID NO: 32469 - DNA, 203 bp, synthetic construct; identical to SEQ ID NO: 13180
  source 1..203: mol_type = other DNA

SEQ ID NO: 32470 - DNA, 203 bp, synthetic construct; identical to SEQ ID NO: 13182
  source 1..203: mol_type = other DNA

SEQ ID NO: 32471 - DNA, 203 bp, synthetic construct; identical to SEQ ID NO: 13183
  source 1..203: mol_type = other DNA

SEQ ID NO: 32472 - DNA, 203 bp, synthetic construct; identical to SEQ ID NO: 13184
  source 1..203: mol_type = other DNA

SEQ ID NO: 32473 - DNA, 203 bp, synthetic construct; identical to SEQ ID NO: 13186
  source 1..203: mol_type = other DNA

SEQ ID NO: 32474 - DNA, 203 bp, synthetic construct; identical to SEQ ID NO: 13187
  source 1..203: mol_type = other DNA

SEQ ID NO: 32475 - DNA, 203 bp, synthetic construct; identical to SEQ ID NO: 13188
  source 1..203: mol_type = other DNA

SEQ ID NO: 32476 - DNA, 203 bp, synthetic construct; identical to SEQ ID NO: 13189
  source 1..203: mol_type = other DNA

SEQ ID NO: 32477 - DNA, 203 bp, synthetic construct; identical to SEQ ID NO: 13190
  source 1..203: mol_type = other DNA

SEQ ID NO: 32478 - DNA, 203 bp, synthetic construct; identical to SEQ ID NO: 13192
  source 1..203: mol_type = other DNA

SEQ ID NO: 32479 - DNA, 203 bp, synthetic construct; identical to SEQ ID NO: 13207
  source 1..203: mol_type = other DNA

SEQ ID NO: 32480 - DNA, 203 bp, synthetic construct; identical to SEQ ID NO: 13208
  source 1..203: mol_type = other DNA

SEQ ID NO: 32481 - DNA, 203 bp, synthetic construct; identical to SEQ ID NO: 13209
  source 1..203: mol_type = other DNA

SEQ ID NO: 32482 - DNA, 203 bp, synthetic construct; identical to SEQ ID NO: 13220
  source 1..203: mol_type = other DNA

SEQ ID NO: 32483 - DNA, 203 bp, synthetic construct; identical to SEQ ID NO: 13222
  source 1..203: mol_type = other DNA

SEQ ID NO: 32484 - DNA, 203 bp, synthetic construct; identical to SEQ ID NO: 13223
  source 1..203: mol_type = other DNA

SEQ ID NO: 32485 - DNA, 203 bp, synthetic construct; identical to SEQ ID NO: 13233
  source 1..203: mol_type = other DNA

SEQ ID NO: 32486 - DNA, 203 bp, synthetic construct; identical to SEQ ID NO: 13239
  source 1..203: mol_type = other DNA

SEQ ID NO: 32487 - DNA, 203 bp, synthetic construct; identical to SEQ ID NO: 13241
  source 1..203: mol_type = other DNA

SEQ ID NO: 32488 - DNA, 203 bp, synthetic construct; identical to SEQ ID NO: 13242
  source 1..203: mol_type = other DNA

SEQ ID NO: 32489 - DNA, 203 bp, synthetic construct; identical to SEQ ID NO: 13243
  source 1..203: mol_type = other DNA

SEQ ID NO: 32490 - DNA, 203 bp, synthetic construct; identical to SEQ ID NO: 13244
  source 1..203: mol_type = other DNA

SEQ ID NO: 32491 - DNA, 203 bp, synthetic construct; identical to SEQ ID NO: 13246
  source 1..203: mol_type = other DNA

SEQ ID NO: 32492 - DNA, 203 bp, synthetic construct; identical to SEQ ID NO: 13247
  source 1..203: mol_type = other DNA

SEQ ID NO: 32493 - DNA, 203 bp, synthetic construct; identical to SEQ ID NO: 13248
  source 1..203: mol_type = other DNA

SEQ ID NO: 32494 - DNA, 203 bp, synthetic construct; identical to SEQ ID NO: 13250
  source 1..203: mol_type = other DNA

SEQ ID NO: 32495 - DNA, 203 bp, synthetic construct; identical to SEQ ID NO: 13252
  source 1..203: mol_type = other DNA

SEQ ID NO: 32496 - DNA, 203 bp, synthetic construct; identical to SEQ ID NO: 13254
  source 1..203: mol_type = other DNA

SEQ ID NO: 32497 - DNA, 203 bp, synthetic construct; identical to SEQ ID NO: 13256
  source 1..203: mol_type = other DNA

SEQ ID NO: 32498 - DNA, 203 bp, synthetic construct; identical to SEQ ID NO: 13257
  source 1..203: mol_type = other DNA

SEQ ID NO: 32499 - DNA, 203 bp, synthetic construct; identical to SEQ ID NO: 13261
  source 1..203: mol_type = other DNA

SEQ ID NO: 32500 - DNA, 203 bp, synthetic construct; identical to SEQ ID NO: 13262
  source 1..203: mol_type = other DNA

SEQ ID NO: 32501 - DNA, 203 bp, synthetic construct; identical to SEQ ID NO: 13263
  source 1..203: mol_type = other DNA

SEQ ID NO: 32502 - DNA, 203 bp, synthetic construct; identical to SEQ ID NO: 13265
  source 1..203: mol_type = other DNA

SEQ ID NO: 32503 - DNA, 203 bp, synthetic construct; identical to SEQ ID NO: 13269
  source 1..203: mol_type = other DNA

SEQ ID NO: 32504 - DNA, 203 bp, synthetic construct; identical to SEQ ID NO: 13270
  source 1..203: mol_type = other DNA

SEQ ID NO: 32505 - DNA, 203 bp, synthetic construct; identical to SEQ ID NO: 13271
  source 1..203: mol_type = other DNA

SEQ ID NO: 32506 - DNA, 203 bp, synthetic construct; identical to SEQ ID NO: 13314
  source 1..203: mol_type = other DNA

SEQ ID NO: 32507 - DNA, 203 bp, synthetic construct; identical to SEQ ID NO: 13323
  source 1..203: mol_type = other DNA

SEQ ID NO: 32508 - DNA, 203 bp, synthetic construct; identical to SEQ ID NO: 13324
  source 1..203: mol_type = other DNA

SEQ ID NO: 32509 - DNA, 203 bp, synthetic construct; identical to SEQ ID NO: 13402
  source 1..203: mol_type = other DNA

SEQ ID NO: 32510 - DNA, 203 bp, synthetic construct; identical to SEQ ID NO: 13403
  source 1..203: mol_type = other DNA

SEQ ID NO: 32511 - DNA, 203 bp, synthetic construct; identical to SEQ ID NO: 13404
  source 1..203: mol_type = other DNA

SEQ ID NO: 32512 - DNA, 203 bp, synthetic construct; identical to SEQ ID NO: 13415
  source 1..203: mol_type = other DNA

SEQ ID NO: 32513 - DNA, 203 bp, synthetic construct; identical to SEQ ID NO: 13420
  source 1..203: mol_type = other DNA

SEQ ID NO: 32514 - DNA, 203 bp, synthetic construct; identical to SEQ ID NO: 13422
  source 1..203: mol_type = other DNA

SEQ ID NO: 32515 - DNA, 203 bp, synthetic construct; identical to SEQ ID NO: 13429
  source 1..203: mol_type = other DNA

SEQ ID NO: 32516 - DNA, 203 bp, synthetic construct; identical to SEQ ID NO: 13430
  source 1..203: mol_type = other DNA

SEQ ID NO: 32517 - DNA, 203 bp, synthetic construct; identical to SEQ ID NO: 13434
  source 1..203: mol_type = other DNA

SEQ ID NO: 32518 - DNA, 203 bp, synthetic construct; identical to SEQ ID NO: 13435
  source 1..203: mol_type = other DNA

SEQ ID NO: 32519 - DNA, 203 bp, synthetic construct; identical to SEQ ID NO: 13450
  source 1..203: mol_type = other DNA

SEQ ID NO: 32520 - DNA, 203 bp, synthetic construct; identical to SEQ ID NO: 13463
  source 1..203: mol_type = other DNA

SEQ ID NO: 32521 - DNA, 203 bp, synthetic construct; identical to SEQ ID NO: 13464
  source 1..203: mol_type = other DNA

SEQ ID NO: 32522 - DNA, 203 bp, synthetic construct; identical to SEQ ID NO: 13465
  source 1..203: mol_type = other DNA

SEQ ID NO: 32523 - DNA, 203 bp, synthetic construct; identical to SEQ ID NO: 13470
  source 1..203: mol_type = other DNA

SEQ ID NO: 32524 - DNA, 203 bp, synthetic construct; identical to SEQ ID NO: 13472
  source 1..203: mol_type = other DNA

SEQ ID NO: 32525 - DNA, 203 bp, synthetic construct; identical to SEQ ID NO: 13473
  source 1..203: mol_type = other DNA

SEQ ID NO: 32526 - DNA, 203 bp, synthetic construct; identical to SEQ ID NO: 13482
  source 1..203: mol_type = other DNA

SEQ ID NO: 32527 - DNA, 203 bp, synthetic construct; identical to SEQ ID NO: 13483
  source 1..203: mol_type = other DNA

SEQ ID NO: 32528 - DNA, 203 bp, synthetic construct; identical to SEQ ID NO: 13484
  source 1..203: mol_type = other DNA

SEQ ID NO: 32529 - DNA, 203 bp, synthetic construct; identical to SEQ ID NO: 13485
  source 1..203: mol_type = other DNA

SEQ ID NO: 32530 - DNA, 203 bp, synthetic construct; identical to SEQ ID NO: 13486
  source 1..203: mol_type = other DNA

SEQ ID NO: 32531 - DNA, 203 bp, synthetic construct; identical to SEQ ID NO: 13487
  source 1..203: mol_type = other DNA

SEQ ID NO: 32532 - DNA, 203 bp, synthetic construct; identical to SEQ ID NO: 13488
  source 1..203: mol_type = other DNA

SEQ ID NO: 32533 - DNA, 203 bp, synthetic construct; identical to SEQ ID NO: 13490
  source 1..203: mol_type = other DNA

SEQ ID NO: 32534 - DNA, 203 bp, synthetic construct; identical to SEQ ID NO: 13491
  source 1..203: mol_type = other DNA

SEQ ID NO: 32535 - DNA, 203 bp, synthetic construct; identical to SEQ ID NO: 13494
  source 1..203: mol_type = other DNA

SEQ ID NO: 32536 - DNA, 203 bp, synthetic construct; identical to SEQ ID NO: 13496
  source 1..203: mol_type = other DNA

SEQ ID NO: 32537 - DNA, 203 bp, synthetic construct; identical to SEQ ID NO: 13507
  source 1..203: mol_type = other DNA

SEQ ID NO: 32538 - DNA, 203 bp, synthetic construct; identical to SEQ ID NO: 13508
  source 1..203: mol_type = other DNA

SEQ ID NO: 32539 - DNA, 203 bp, synthetic construct; identical to SEQ ID NO: 13519
  source 1..203: mol_type = other DNA

SEQ ID NO: 32540 - DNA, 203 bp, synthetic construct; identical to SEQ ID NO: 13520
  source 1..203: mol_type = other DNA

SEQ ID NO: 32541 - DNA, 203 bp, synthetic construct; identical to SEQ ID NO: 13521
  source 1..203: mol_type = other DNA

SEQ ID NO: 32542 - DNA, 203 bp, synthetic construct; identical to SEQ ID NO: 13531
  source 1..203: mol_type = other DNA

SEQ ID NO: 32543 - DNA, 203 bp, synthetic construct; identical to SEQ ID NO: 13532
  source 1..203: mol_type = other DNA

SEQ ID NO: 32544 - DNA, 203 bp, synthetic construct; identical to SEQ ID NO: 13533
  source 1..203: mol_type = other DNA

SEQ ID NO: 32545 - DNA, 203 bp, synthetic construct; identical to SEQ ID NO: 13548
  source 1..203: mol_type = other DNA

SEQ ID NO: 32546 - DNA, 203 bp, synthetic construct; identical to SEQ ID NO: 13583
  source 1..203: mol_type = other DNA

SEQ ID NO: 32547 - DNA, 203 bp, synthetic construct; identical to SEQ ID NO: 13600
  source 1..203: mol_type = other DNA

SEQ ID NO: 32548 - DNA, 203 bp, synthetic construct; identical to SEQ ID NO: 13622
  source 1..203: mol_type = other DNA

SEQ ID NO: 32549 - DNA, 203 bp, synthetic construct; identical to SEQ ID NO: 13624
  source 1..203: mol_type = other DNA

SEQ ID NO: 32550 - DNA, 203 bp, synthetic construct; identical to SEQ ID NO: 13626
  source 1..203: mol_type = other DNA

SEQ ID NO: 32551 - DNA, 203 bp, synthetic construct; identical to SEQ ID NO: 13627
  source 1..203: mol_type = other DNA

SEQ ID NO: 32552 - DNA, 203 bp, synthetic construct; identical to SEQ ID NO: 13628
  source 1..203: mol_type = other DNA

SEQ ID NO: 32553 - DNA, 203 bp, synthetic construct; identical to SEQ ID NO: 13630
  source 1..203: mol_type = other DNA

SEQ ID NO: 32554 - DNA, 203 bp, synthetic construct; identical to SEQ ID NO: 13631
  source 1..203: mol_type = other DNA

SEQ ID NO: 32555 - DNA, 203 bp, synthetic construct; identical to SEQ ID NO: 13649
  source 1..203: mol_type = other DNA

SEQ ID NO: 32556 - DNA, 203 bp, synthetic construct; identical to SEQ ID NO: 13653
  source 1..203: mol_type = other DNA

SEQ ID NO: 32557 - DNA, 203 bp, synthetic construct; identical to SEQ ID NO: 13654
  source 1..203: mol_type = other DNA

SEQ ID NO: 32558 - DNA, 203 bp, synthetic construct; identical to SEQ ID NO: 13668
  source 1..203: mol_type = other DNA

SEQ ID NO: 32559 - DNA, 203 bp, synthetic construct; identical to SEQ ID NO: 13672
  source 1..203: mol_type = other DNA

SEQ ID NO: 32560 - DNA, 203 bp, synthetic construct; identical to SEQ ID NO: 13673
  source 1..203: mol_type = other DNA

SEQ ID NO: 32561 - DNA, 203 bp, synthetic construct; identical to SEQ ID NO: 13674
  source 1..203: mol_type = other DNA

SEQ ID NO: 32562 - DNA, 203 bp, synthetic construct; identical to SEQ ID NO: 13677
  source 1..203: mol_type = other DNA

SEQ ID NO: 32563 - DNA, 203 bp, synthetic construct; identical to SEQ ID NO: 13678
  source 1..203: mol_type = other DNA

SEQ ID NO: 32564 - DNA, 203 bp, synthetic construct; identical to SEQ ID NO: 13679
  source 1..203: mol_type = other DNA

SEQ ID NO: 32565 - DNA, 203 bp, synthetic construct; identical to SEQ ID NO: 13686
  source 1..203: mol_type = other DNA

SEQ ID NO: 32566 - DNA, 203 bp, synthetic construct; identical to SEQ ID NO: 13687
  source 1..203: mol_type = other DNA

SEQ ID NO: 32567 - DNA, 203 bp, synthetic construct; identical to SEQ ID NO: 13689
  source 1..203: mol_type = other DNA

SEQ ID NO: 32568 - DNA, 203 bp, synthetic construct; identical to SEQ ID NO: 13690
  source 1..203: mol_type = other DNA

SEQ ID NO: 32569 - DNA, 203 bp, synthetic construct; identical to SEQ ID NO: 13692
  source 1..203: mol_type = other DNA

SEQ ID NO: 32570 - DNA, 203 bp, synthetic construct; identical to SEQ ID NO: 13700
  source 1..203: mol_type = other DNA

SEQ ID NO: 32571 - DNA, 203 bp, synthetic construct; identical to SEQ ID NO: 13706
  source 1..203: mol_type = other DNA

SEQ ID NO: 32572 - DNA, 203 bp, synthetic construct; identical to SEQ ID NO: 13709
  source 1..203: mol_type = other DNA

SEQ ID NO: 32573 - DNA, 203 bp, synthetic construct; identical to SEQ ID NO: 13715
  source 1..203: mol_type = other DNA

SEQ ID NO: 32574 - DNA, 203 bp, synthetic construct; identical to SEQ ID NO: 13716
  source 1..203: mol_type = other DNA

SEQ ID NO: 32575 - DNA, 203 bp, synthetic construct; identical to SEQ ID NO: 13717
  source 1..203: mol_type = other DNA

SEQ ID NO: 32576 - DNA, 203 bp, synthetic construct; identical to SEQ ID NO: 13718
  source 1..203: mol_type = other DNA

SEQ ID NO: 32577 - DNA, 203 bp, synthetic construct; identical to SEQ ID NO: 13719
  source 1..203: mol_type = other DNA

SEQ ID NO: 32578 - DNA, 203 bp, synthetic construct; identical to SEQ ID NO: 13720
  source 1..203: mol_type = other DNA

SEQ ID NO: 32579 - DNA, 203 bp, synthetic construct; identical to SEQ ID NO: 13721
  source 1..203: mol_type = other DNA

SEQ ID NO: 32580 - DNA, 203 bp, synthetic construct; identical to SEQ ID NO: 13722
  source 1..203: mol_type = other DNA

SEQ ID NO: 32581 - DNA, 203 bp, synthetic construct; identical to SEQ ID NO: 13723
  source 1..203: mol_type = other DNA

SEQ ID NO: 32582 - DNA, 203 bp, synthetic construct; identical to SEQ ID NO: 13724
  source 1..203: mol_type = other DNA

SEQ ID NO: 32583 - DNA, 203 bp, synthetic construct; identical to SEQ ID NO: 13753
  source 1..203: mol_type = other DNA

SEQ ID NO: 32584 - DNA, 203 bp, synthetic construct; identical to SEQ ID NO: 13754
  source 1..203: mol_type = other DNA

SEQ ID NO: 32585 - DNA, 203 bp, synthetic construct; identical to SEQ ID NO: 13756
  source 1..203: mol_type = other DNA

SEQ ID NO: 32586 - DNA, 203 bp, synthetic construct; identical to SEQ ID NO: 13758
  source 1..203: mol_type = other DNA

SEQ ID NO: 32587 - DNA, 203 bp, synthetic construct; identical to SEQ ID NO: 13759
  source 1..203: mol_type = other DNA

SEQ ID NO: 32588 - DNA, 203 bp, synthetic construct; identical to SEQ ID NO: 13760
  source 1..203: mol_type = other DNA

SEQ ID NO: 32589 - DNA, 203 bp, synthetic construct; identical to SEQ ID NO: 13761
  source 1..203: mol_type = other DNA

SEQ ID NO: 32590 - DNA, 203 bp, synthetic construct; identical to SEQ ID NO: 13762
  source 1..203: mol_type = other DNA

SEQ ID NO: 32591 - DNA, 203 bp, synthetic construct; identical to SEQ ID NO: 13763
  source 1..203: mol_type = other DNA

SEQ ID NO: 32592 - DNA, 203 bp, synthetic construct; identical to SEQ ID NO: 13764
  source 1..203: mol_type = other DNA

SEQ ID NO: 32593 - DNA, 203 bp, synthetic construct; identical to SEQ ID NO: 13780
  source 1..203: mol_type = other DNA

SEQ ID NO: 32594 - DNA, 203 bp, synthetic construct; identical to SEQ ID NO: 13781
  source 1..203: mol_type = other DNA

SEQ ID NO: 32595 - DNA, 203 bp, synthetic construct; identical to SEQ ID NO: 13790
  source 1..203: mol_type = other DNA

SEQ ID NO: 32596 - DNA, 203 bp, synthetic construct; identical to SEQ ID NO: 13792
  source 1..203: mol_type = other DNA

SEQ ID NO: 32597 - DNA, 203 bp, synthetic construct; identical to SEQ ID NO: 13793
  source 1..203: mol_type = other DNA

SEQ ID NO: 32598 - DNA, 203 bp, synthetic construct; identical to SEQ ID NO: 13794
  source 1..203: mol_type = other DNA

SEQ ID NO: 32599 - DNA, 203 bp, synthetic construct; identical to SEQ ID NO: 13795
  source 1..203: mol_type = other DNA

SEQ ID NO: 32600 - DNA, 203 bp, synthetic construct; identical to SEQ ID NO: 13798
  source 1..203: mol_type = other DNA

SEQ ID NO: 32601 - DNA, 203 bp, synthetic construct; identical to SEQ ID NO: 13799
  source 1..203: mol_type = other DNA

SEQ ID NO: 32602 - DNA, 203 bp, synthetic construct; identical to SEQ ID NO: 13800
  source 1..203: mol_type = other DNA

SEQ ID NO: 32603 - DNA, 203 bp, synthetic construct; identical to SEQ ID NO: 13810
  source 1..203: mol_type = other DNA

SEQ ID NO: 32604 - DNA, 203 bp, synthetic construct; identical to SEQ ID NO: 13811
  source 1..203: mol_type = other DNA

SEQ ID NO: 32605 - DNA, 203 bp, synthetic construct; identical to SEQ ID NO: 13813
  source 1..203: mol_type = other DNA

SEQ ID NO: 32606 - DNA, 203 bp, synthetic construct; identical to SEQ ID NO: 13814
  source 1..203: mol_type = other DNA

SEQ ID NO: 32607 - DNA, 203 bp, synthetic construct; identical to SEQ ID NO: 13815
  source 1..203: mol_type = other DNA

SEQ ID NO: 32608 - DNA, 203 bp, synthetic construct; identical to SEQ ID NO: 13816
  source 1..203: mol_type = other DNA

SEQ ID NO: 32609 - DNA, 203 bp, synthetic construct; identical to SEQ ID NO: 13819
  source 1..203: mol_type = other DNA

SEQ ID NO: 32610 - DNA, 203 bp, synthetic construct; identical to SEQ ID NO: 13823
  source 1..203: mol_type = other DNA

SEQ ID NO: 32611 - DNA, 203 bp, synthetic construct; identical to SEQ ID NO: 13824
  source 1..203: mol_type = other DNA

SEQ ID NO: 32612 - DNA, 203 bp, synthetic construct; identical to SEQ ID NO: 13827
  source 1..203: mol_type = other DNA

SEQ ID NO: 32613 - DNA, 203 bp, synthetic construct; identical to SEQ ID NO: 13828
  source 1..203: mol_type = other DNA

SEQ ID NO: 32614 - DNA, 203 bp, synthetic construct; identical to SEQ ID NO: 13829
  source 1..203: mol_type = other DNA

SEQ ID NO: 32615 - DNA, 203 bp, synthetic construct; identical to SEQ ID NO: 13830
  source 1..203: mol_type = other DNA

SEQ ID NO: 32616 - DNA, 203 bp, synthetic construct; identical to SEQ ID NO: 13831
  source 1..203: mol_type = other DNA

SEQ ID NO: 32617 - DNA, 203 bp, synthetic construct; identical to SEQ ID NO: 13832
  source 1..203: mol_type = other DNA

SEQ ID NO: 32618 - DNA, 203 bp, synthetic construct; identical to SEQ ID NO: 13833
  source 1..203: mol_type = other DNA

SEQ ID NO: 32619 - DNA, 203 bp, synthetic construct; identical to SEQ ID NO: 13834
  source 1..203: mol_type = other DNA

SEQ ID NO: 32620 - DNA, 203 bp, synthetic construct; identical to SEQ ID NO: 13836
  source 1..203: mol_type = other DNA

SEQ ID NO: 32621 - DNA, 203 bp, synthetic construct; identical to SEQ ID NO: 13837
  source 1..203: mol_type = other DNA

SEQ ID NO: 32622 - DNA, 203 bp, synthetic construct; identical to SEQ ID NO: 13841
  source 1..203: mol_type = other DNA

SEQ ID NO: 32623 - DNA, 203 bp, synthetic construct; identical to SEQ ID NO: 13843
  source 1..203: mol_type = other DNA

SEQ ID NO: 32624 - DNA, 203 bp, synthetic construct; identical to SEQ ID NO: 13844
  source 1..203: mol_type = other DNA

SEQ ID NO: 32625 - DNA, 203 bp, synthetic construct; identical to SEQ ID NO: 13861
  source 1..203: mol_type = other DNA

SEQ ID NO: 32626 - DNA, 203 bp, synthetic construct; identical to SEQ ID NO: 13865
  source 1..203: mol_type = other DNA

SEQ ID NO: 32627 - DNA, 203 bp, synthetic construct; identical to SEQ ID NO: 13868
  source 1..203: mol_type = other DNA

SEQ ID NO: 32628 - DNA, 203 bp, synthetic construct; identical to SEQ ID NO: 13871
  source 1..203: mol_type = other DNA

SEQ ID NO: 32629 - DNA, 203 bp, synthetic construct; identical to SEQ ID NO: 13872
  source 1..203: mol_type = other DNA

SEQ ID NO: 32630 - DNA, 203 bp, synthetic construct; identical to SEQ ID NO: 13879
  source 1..203: mol_type = other DNA

SEQ ID NO: 32631 - DNA, 203 bp, synthetic construct; identical to SEQ ID NO: 13882
  source 1..203: mol_type = other DNA

SEQ ID NO: 32632 - DNA, 203 bp, synthetic construct; identical to SEQ ID NO: 13920
  source 1..203: mol_type = other DNA

SEQ ID NO: 32633 - DNA, 203 bp, synthetic construct; identical to SEQ ID NO: 13922
  source 1..203: mol_type = other DNA

SEQ ID NO: 32634 - DNA, 203 bp, synthetic construct; identical to SEQ ID NO: 13929
  source 1..203: mol_type = other DNA

SEQ ID NO: 32635 - DNA, 203 bp, synthetic construct; identical to SEQ ID NO: 13945
  source 1..203: mol_type = other DNA

SEQ ID NO: 32636 - DNA, 203 bp, synthetic construct; identical to SEQ ID NO: 13954
  source 1..203: mol_type = other DNA

SEQ ID NO: 32637 - DNA, 203 bp, synthetic construct; identical to SEQ ID NO: 13963
  source 1..203: mol_type = other DNA

SEQ ID NO: 32638 - DNA, 203 bp, synthetic construct; identical to SEQ ID NO: 13964
  source 1..203: mol_type = other DNA

SEQ ID NO: 32639 - DNA, 203 bp, synthetic construct; identical to SEQ ID NO: 13965
  source 1..203: mol_type = other DNA

SEQ ID NO: 32640 - DNA, 203 bp, synthetic construct; identical to SEQ ID NO: 13994
  source 1..203: mol_type = other DNA

SEQ ID NO: 32641 - DNA, 203 bp, synthetic construct; identical to SEQ ID NO: 14004
  source 1..203: mol_type = other DNA

SEQ ID NO: 32642 - DNA, 203 bp, synthetic construct; identical to SEQ ID NO: 14026
  source 1..203: mol_type = other DNA

SEQ ID NO: 32643 - DNA, 203 bp, synthetic construct; identical to SEQ ID NO: 14027
  source 1..203: mol_type = other DNA

SEQ ID NO: 32644 - DNA, 203 bp, synthetic construct; identical to SEQ ID NO: 14029
  source 1..203: mol_type = other DNA

SEQ ID NO: 32645 - DNA, 203 bp, synthetic construct; identical to SEQ ID NO: 14032
  source 1..203: mol_type = other DNA

SEQ ID NO: 32646 - DNA, 203 bp, synthetic construct; identical to SEQ ID NO: 14033
  source 1..203: mol_type = other DNA

SEQ ID NO: 32647 - DNA, 203 bp, synthetic construct; identical to SEQ ID NO: 14034
  source 1..203: mol_type = other DNA

SEQ ID NO: 32648 - DNA, 203 bp, synthetic construct; identical to SEQ ID NO: 14036
  source 1..203: mol_type = other DNA

SEQ ID NO: 32649 - DNA, 203 bp, synthetic construct; identical to SEQ ID NO: 14037
  source 1..203: mol_type = other DNA

SEQ ID NO: 32650 - DNA, 203 bp, synthetic construct; identical to SEQ ID NO: 14038
  source 1..203: mol_type = other DNA

SEQ ID NO: 32651 - DNA, 203 bp, synthetic construct; identical to SEQ ID NO: 14039
  source 1..203: mol_type = other DNA

SEQ ID NO: 32652 - DNA, 203 bp, synthetic construct; identical to SEQ ID NO: 14042
  source 1..203: mol_type = other DNA

SEQ ID NO: 32653 - DNA, 203 bp, synthetic construct; identical to SEQ ID NO: 14043
  source 1..203: mol_type = other DNA

SEQ ID NO: 32654 - DNA, 203 bp, synthetic construct; identical to SEQ ID NO: 14055
  source 1..203: mol_type = other DNA

SEQ ID NO: 32655 - DNA, 203 bp, synthetic construct; identical to SEQ ID NO: 14058
  source 1..203: mol_type = other DNA

SEQ ID NO: 32656 - DNA, 203 bp, synthetic construct; identical to SEQ ID NO: 14059
  source 1..203: mol_type = other DNA

SEQ ID NO: 32657 - DNA, 203 bp, synthetic construct; identical to SEQ ID NO: 14061
  source 1..203: mol_type = other DNA

SEQ ID NO: 32658 - DNA, 203 bp, synthetic construct; identical to SEQ ID NO: 14063
  source 1..203: mol_type = other DNA

SEQ ID NO: 32659 - DNA, 203 bp, synthetic construct; identical to SEQ ID NO: 14085
  source 1..203: mol_type = other DNA

SEQ ID NO: 32660 - DNA, 203 bp, synthetic construct; identical to SEQ ID NO: 14086
  source 1..203: mol_type = other DNA

SEQ ID NO: 32661 - DNA, 203 bp, synthetic construct; identical to SEQ ID NO: 14087
  source 1..203: mol_type = other DNA

SEQ ID NO: 32662 - DNA, 203 bp, synthetic construct; identical to SEQ ID NO: 14088
  source 1..203: mol_type = other DNA

SEQ ID NO: 32663 - DNA, 203 bp, synthetic construct; identical to SEQ ID NO: 14100
  source 1..203: mol_type = other DNA

SEQ ID NO: 32664 - DNA, 203 bp, synthetic construct; identical to SEQ ID NO: 14111
  source 1..203: mol_type = other DNA

SEQ ID NO: 32665 - DNA, 203 bp, synthetic construct; identical to SEQ ID NO: 14112
  source 1..203: mol_type = other DNA

SEQ ID NO: 32666 - DNA, 203 bp, synthetic construct; identical to SEQ ID NO: 14113
  source 1..203: mol_type = other DNA

SEQ ID NO: 32667 - DNA, 203 bp, synthetic construct; identical to SEQ ID NO: 14118
  source 1..203: mol_type = other DNA

SEQ ID NO: 32668 - DNA, 203 bp, synthetic construct; identical to SEQ ID NO: 14119
  source 1..203: mol_type = other DNA

SEQ ID NO: 32669 - DNA, 203 bp, synthetic construct; identical to SEQ ID NO: 14120
  source 1..203: mol_type = other DNA

SEQ ID NO: 32670 - DNA, 203 bp, synthetic construct; identical to SEQ ID NO: 14121
  source 1..203: mol_type = other DNA

SEQ ID NO: 32671 - DNA, 203 bp, synthetic construct; identical to SEQ ID NO: 14125
  source 1..203: mol_type = other DNA

SEQ ID NO: 32672 - DNA, 203 bp, synthetic construct; identical to SEQ ID NO: 14126
  source 1..203: mol_type = other DNA

SEQ ID NO: 32673 - DNA, 203 bp, synthetic construct; identical to SEQ ID NO: 14127
  source 1..203: mol_type = other DNA

SEQ ID NO: 32674 - DNA, 203 bp, synthetic construct; identical to SEQ ID NO: 14130
  source 1..203: mol_type = other DNA

SEQ ID NO: 32675 - DNA, 203 bp, synthetic construct; identical to SEQ ID NO: 14135
  source 1..203: mol_type = other DNA

SEQ ID NO: 32676 - DNA, 203 bp, synthetic construct; identical to SEQ ID NO: 14136
  source 1..203: mol_type = other DNA

SEQ ID NO: 32677 - DNA, 203 bp, synthetic construct; identical to SEQ ID NO: 14137
  source 1..203: mol_type = other DNA

SEQ ID NO: 32678 - DNA, 203 bp, synthetic construct; identical to SEQ ID NO: 14144
  source 1..203: mol_type = other DNA

SEQ ID NO: 32679 - DNA, 203 bp, synthetic construct; identical to SEQ ID NO: 14153
  source 1..203: mol_type = other DNA

SEQ ID NO: 32680 - DNA, 203 bp, synthetic construct; identical to SEQ ID NO: 14154
  source 1..203: mol_type = other DNA

SEQ ID NO: 32681 - DNA, 203 bp, synthetic construct; identical to SEQ ID NO: 14155
  source 1..203: mol_type = other DNA

SEQ ID NO: 32682 - DNA, 203 bp, synthetic construct; identical to SEQ ID NO: 14156
  source 1..203: mol_type = other DNA

SEQ ID NO: 32683 - DNA, 203 bp, synthetic construct; identical to SEQ ID NO: 14158
  source 1..203: mol_type = other DNA

SEQ ID NO: 32684 - DNA, 203 bp, synthetic construct; identical to SEQ ID NO: 14159
  source 1..203: mol_type = other DNA

SEQ ID NO: 32685 - DNA, 203 bp, synthetic construct; identical to SEQ ID NO: 14161
  source 1..203: mol_type = other DNA

SEQ ID NO: 32686 - DNA, 203 bp, synthetic construct; identical to SEQ ID NO: 14162
  source 1..203: mol_type = other DNA

SEQ ID NO: 32687 - DNA, 203 bp, synthetic construct; identical to SEQ ID NO: 14163
  source 1..203: mol_type = other DNA

SEQ ID NO: 32688 - DNA, 203 bp, synthetic construct; identical to SEQ ID NO: 14165
  source 1..203: mol_type = other DNA

SEQ ID NO: 32689 - DNA, 203 bp, synthetic construct; identical to SEQ ID NO: 14166
  source 1..203: mol_type = other DNA

SEQ ID NO: 32690 - DNA, 203 bp, synthetic construct; identical to SEQ ID NO: 14167
  source 1..203: mol_type = other DNA

SEQ ID NO: 32691 - DNA, 203 bp, synthetic construct; identical to SEQ ID NO: 14206
  source 1..203: mol_type = other DNA

SEQ ID NO: 32692 - DNA, 203 bp, synthetic construct; identical to SEQ ID NO: 14208
  source 1..203: mol_type = other DNA

SEQ ID NO: 32693 - DNA, 203 bp, synthetic construct; identical to SEQ ID NO: 14210
  source 1..203: mol_type = other DNA

SEQ ID NO: 32694 - DNA, 203 bp, synthetic construct; identical to SEQ ID NO: 14218
  source 1..203: mol_type = other DNA

SEQ ID NO: 32695 - DNA, 203 bp, synthetic construct; identical to SEQ ID NO: 14242
  source 1..203: mol_type = other DNA

SEQ ID NO: 32696 - DNA, 203 bp, synthetic construct; identical to SEQ ID NO: 14244
  source 1..203: mol_type = other DNA

SEQ ID NO: 32697 - DNA, 203 bp, synthetic construct; identical to SEQ ID NO: 14245
  source 1..203: mol_type = other DNA

SEQ ID NO: 32698 - DNA, 203 bp, synthetic construct; identical to SEQ ID NO: 14275
  source 1..203: mol_type = other DNA

SEQ ID NO: 32699 - DNA, 203 bp, synthetic construct; identical to SEQ ID NO: 14329
  source 1..203: mol_type = other DNA

SEQ ID NO: 32700 - DNA, 203 bp, synthetic construct; identical to SEQ ID NO: 14330
  source 1..203: mol_type = other DNA

SEQ ID NO: 32701 - DNA, 203 bp, synthetic construct; identical to SEQ ID NO: 14331
  source 1..203: mol_type = other DNA

SEQ ID NO: 32702 - DNA, 203 bp, synthetic construct; identical to SEQ ID NO: 14332
  source 1..203: mol_type = other DNA

SEQ ID NO: 32703 - DNA, 203 bp, synthetic construct; identical to SEQ ID NO: 14334
  source 1..203: mol_type = other DNA

SEQ ID NO: 32704 - DNA, 203 bp, synthetic construct; identical to SEQ ID NO: 14339
  source 1..203: mol_type = other DNA

SEQ ID NO: 32705 - DNA, 203 bp, synthetic construct; identical to SEQ ID NO: 14342
  source 1..203: mol_type = other DNA

SEQ ID NO: 32706 - DNA, 203 bp, synthetic construct; identical to SEQ ID NO: 14343
  source 1..203: mol_type = other DNA

SEQ ID NO: 32707 - DNA, 203 bp, synthetic construct; identical to SEQ ID NO: 14344
  source 1..203: mol_type = other DNA

SEQ ID NO: 32708 - DNA, 203 bp, synthetic construct; identical to SEQ ID NO: 14346
  source 1..203: mol_type = other DNA

SEQ ID NO: 32709 - DNA, 203 bp, synthetic construct; identical to SEQ ID NO: 14347
  source 1..203: mol_type = other DNA

SEQ ID NO: 32710 - DNA, 203 bp, synthetic construct; identical to SEQ ID NO: 14349
  source 1..203: mol_type = other DNA

SEQ ID NO: 32711 - DNA, 203 bp, synthetic construct; identical to SEQ ID NO: 14352
  source 1..203: mol_type = other DNA

SEQ ID NO: 32712 - DNA, 203 bp, synthetic construct; identical to SEQ ID NO: 14376
  source 1..203: mol_type = other DNA

SEQ ID NO: 32713 - DNA, 203 bp, synthetic construct; identical to SEQ ID NO: 14377
  source 1..203: mol_type = other DNA

SEQ ID NO: 32714 - DNA, 203 bp, synthetic construct; identical to SEQ ID NO: 14379
  source 1..203: mol_type = other DNA

SEQ ID NO: 32715 - DNA, 203 bp, synthetic construct; identical to SEQ ID NO: 14380
  source 1..203: mol_type = other DNA

SEQ ID NO: 32716 - DNA, 203 bp, synthetic construct; identical to SEQ ID NO: 14382
  source 1..203: mol_type = other DNA

SEQ ID NO: 32717 - DNA, 203 bp, synthetic construct; identical to SEQ ID NO: 14384
  source 1..203: mol_type = other DNA

SEQ ID NO: 32718 - DNA, 203 bp, synthetic construct; identical to SEQ ID NO: 14387
  source 1..203: mol_type = other DNA

SEQ ID NO: 32719 - DNA, 203 bp, synthetic construct; identical to SEQ ID NO: 14389
  source 1..203: mol_type = other DNA

SEQ ID NO: 32720 - DNA, 203 bp, synthetic construct; identical to SEQ ID NO: 14390
  source 1..203: mol_type = other DNA

SEQ ID NO: 32721 - DNA, 203 bp, synthetic construct; identical to SEQ ID NO: 14391
  source 1..203: mol_type = other DNA

SEQ ID NO: 32722 - DNA, 203 bp, synthetic construct; identical to SEQ ID NO: 14395
  source 1..203: mol_type = other DNA

SEQ ID NO: 32723 - DNA, 203 bp, synthetic construct; identical to SEQ ID NO: 14397
  source 1..203: mol_type = other DNA

SEQ ID NO: 32724 - DNA, 203 bp, synthetic construct; identical to SEQ ID NO: 14398
  source 1..203: mol_type = other DNA

SEQ ID NO: 32725 - DNA, 203 bp, synthetic construct; identical to SEQ ID NO: 14400
  source 1..203: mol_type = other DNA

SEQ ID NO: 32726 - DNA, 203 bp, synthetic construct; identical to SEQ ID NO: 14402
  source 1..203: mol_type = other DNA

SEQ ID NO: 32727 - DNA, 203 bp, synthetic construct; identical to SEQ ID NO: 14404
  source 1..203: mol_type = other DNA

SEQ ID NO: 32728 - DNA, 203 bp, synthetic construct; identical to SEQ ID NO: 14405
  source 1..203: mol_type = other DNA

SEQ ID NO: 32729 - DNA, 203 bp, synthetic construct; identical to SEQ ID NO: 14407
  source 1..203: mol_type = other DNA

SEQ ID NO: 32730 - DNA, 203 bp, synthetic construct; identical to SEQ ID NO: 14408
  source 1..203: mol_type = other DNA

SEQ ID NO: 32731 - DNA, 203 bp, synthetic construct; identical to SEQ ID NO: 14410
  source 1..203: mol_type = other DNA

SEQ ID NO: 32732 - DNA, 203 bp, synthetic construct; identical to SEQ ID NO: 14412
  source 1..203: mol_type = other DNA

SEQ ID NO: 32733 - DNA, 203 bp, synthetic construct; identical to SEQ ID NO: 14413
  source 1..203: mol_type = other DNA

SEQ ID NO: 32734 - DNA, 203 bp, synthetic construct; identical to SEQ ID NO: 14423
  source 1..203: mol_type = other DNA

SEQ ID NO: 32735 - DNA, 203 bp, synthetic construct; identical to SEQ ID NO: 14424
  source 1..203: mol_type = other DNA

SEQ ID NO: 32736 - DNA, 203 bp, synthetic construct; identical to SEQ ID NO: 14425
  source 1..203: mol_type = other DNA

SEQ ID NO: 32737 - DNA, 203 bp, synthetic construct; identical to SEQ ID NO: 14427
  source 1..203: mol_type = other DNA

SEQ ID NO: 32738 - DNA, 203 bp, synthetic construct; identical to SEQ ID NO: 14428
  source 1..203: mol_type = other DNA

SEQ ID NO: 32739 - DNA, 203 bp, synthetic construct; identical to SEQ ID NO: 14429
  source 1..203: mol_type = other DNA

SEQ ID NO: 32740 - DNA, 203 bp, synthetic construct; identical to SEQ ID NO: 14430
  source 1..203: mol_type = other DNA

SEQ ID NO: 32741 - DNA, 203 bp, synthetic construct; identical to SEQ ID NO: 14432
  source 1..203: mol_type = other DNA

SEQ ID NO: 32742 - DNA, 203 bp, synthetic construct; identical to SEQ ID NO: 14434
  source 1..203: mol_type = other DNA

SEQ ID NO: 32743 - DNA, 203 bp, synthetic construct; identical to SEQ ID NO: 14435
  source 1..203: mol_type = other DNA

SEQ ID NO: 32744 - DNA, 203 bp, synthetic construct; identical to SEQ ID NO: 14436
  source 1..203: mol_type = other DNA

SEQ ID NO: 32745 - DNA, 203 bp, synthetic construct; identical to SEQ ID NO: 14437
  source 1..203: mol_type = other DNA

SEQ ID NO: 32746 - DNA, 203 bp, synthetic construct; identical to SEQ ID NO: 14438
  source 1..203: mol_type = other DNA

SEQ ID NO: 32747 - DNA, 203 bp, synthetic construct; identical to SEQ ID NO: 14463
  source 1..203: mol_type = other DNA

SEQ ID NO: 32748 - DNA, 203 bp, synthetic construct; identical to SEQ ID NO: 14540
  source 1..203: mol_type = other DNA

SEQ ID NO: 32749 - DNA, 203 bp, synthetic construct; identical to SEQ ID NO: 14603
  source 1..203: mol_type = other DNA

SEQ ID NO: 32750 - DNA, 203 bp, synthetic construct; identical to SEQ ID NO: 14605
  source 1..203: mol_type = other DNA

SEQ ID NO: 32751 - DNA, 203 bp, synthetic construct; identical to SEQ ID NO: 14609
  source 1..203: mol_type = other DNA

SEQ ID NO: 32752 - DNA, 203 bp, synthetic construct; identical to SEQ ID NO: 14613
  source 1..203: mol_type = other DNA

SEQ ID NO: 32753 - DNA, 203 bp, synthetic construct; identical to SEQ ID NO: 14615
  source 1..203: mol_type = other DNA

SEQ ID NO: 32754 - DNA, 203 bp, synthetic construct; identical to SEQ ID NO: 14700
  source 1..203: mol_type = other DNA

SEQ ID NO: 32755 - DNA, 203 bp, synthetic construct; identical to SEQ ID NO: 14706
  source 1..203: mol_type = other DNA

SEQ ID NO: 32756 - DNA, 203 bp, synthetic construct; identical to SEQ ID NO: 15251
  source 1..203: mol_type = other DNA

SEQ ID NO: 32757 - DNA, 203 bp, synthetic construct; identical to SEQ ID NO: 15252
  source 1..203: mol_type = other DNA

SEQ ID NO: 32758 - DNA, 203 bp, synthetic construct; identical to SEQ ID NO: 15265
  source 1..203: mol_type = other DNA

SEQ ID NO: 32759 - DNA, 203 bp, synthetic construct; identical to SEQ ID NO: 15269
  source 1..203: mol_type = other DNA

SEQ ID NO: 32760 - DNA, 203 bp, synthetic construct; identical to SEQ ID NO: 15275
  source 1..203: mol_type = other DNA

SEQ ID NO: 32761 - DNA, 203 bp, synthetic construct; identical to SEQ ID NO: 15281
  source 1..203: mol_type = other DNA

SEQ ID NO: 32762 - DNA, 203 bp, synthetic construct; identical to SEQ ID NO: 15287
  source 1..203: mol_type = other DNA

SEQ ID NO: 32763 - DNA, 203 bp, synthetic construct; identical to SEQ ID NO: 15291
  source 1..203: mol_type = other DNA

SEQ ID NO: 32764 - DNA, 203 bp, synthetic construct; identical to SEQ ID NO: 15292
  source 1..203: mol_type = other DNA

SEQ ID NO: 32765 - DNA, 203 bp, synthetic construct; identical to SEQ ID NO: 15303
  source 1..203: mol_type = other DNA

SEQ ID NO: 32766 - DNA, 203 bp, synthetic construct; identical to SEQ ID NO: 15307
  source 1..203: mol_type = other DNA

SEQ ID NO: 32767 - DNA, 203 bp, synthetic construct; identical to SEQ ID NO: 15395
  source 1..203: mol_type = other DNA

SEQ ID NO: 32768 - DNA, 203 bp, synthetic construct; identical to SEQ ID NO: 15398
  source 1..203: mol_type = other DNA

SEQ ID NO: 32769 - DNA, 203 bp, synthetic construct; identical to SEQ ID NO: 15407
  source 1..203: mol_type = other DNA

SEQ ID NO: 32770 - DNA, 203 bp, synthetic construct; identical to SEQ ID NO: 15572
  source 1..203: mol_type = other DNA

SEQ ID NO: 32771 - DNA, 203 bp, synthetic construct; identical to SEQ ID NO: 15573
  source 1..203: mol_type = other DNA

SEQ ID NO: 32772 - DNA, 203 bp, synthetic construct; identical to SEQ ID NO: 15575
  source 1..203: mol_type = other DNA

SEQ ID NO: 32773 - DNA, 203 bp, synthetic construct; identical to SEQ ID NO: 15576
  source 1..203: mol_type = other DNA

SEQ ID NO: 32774 - DNA, 203 bp, synthetic construct; identical to SEQ ID NO: 15578
  source 1..203: mol_type = other DNA

SEQ ID NO: 32775 - DNA, 203 bp, synthetic construct; identical to SEQ ID NO: 15580
  source 1..203: mol_type = other DNA

SEQ ID NO: 32776 - DNA, 203 bp, synthetic construct; identical to SEQ ID NO: 15581
  source 1..203: mol_type = other DNA

SEQ ID NO: 32777 - DNA, 203 bp, synthetic construct; identical to SEQ ID NO: 15582
  source 1..203: mol_type = other DNA

SEQ ID NO: 32778 - DNA, 203 bp, synthetic construct; identical to SEQ ID NO: 15584
  source 1..203: mol_type = other DNA

SEQ ID NO: 32779 - DNA, 203 bp, synthetic construct; identical to SEQ ID NO: 15586
  source 1..203: mol_type = other DNA

SEQ ID NO: 32780 - DNA, 203 bp, synthetic construct; identical to SEQ ID NO: 15587
  source 1..203: mol_type = other DNA

SEQ ID NO: 32781 - DNA, 203 bp, synthetic construct; identical to SEQ ID NO: 15588
  source 1..203: mol_type = other DNA

SEQ ID NO: 32782 - DNA, 203 bp, synthetic construct; identical to SEQ ID NO: 15589
  source 1..203: mol_type = other DNA

SEQ ID NO: 32783 - DNA, 203 bp, synthetic construct; identical to SEQ ID NO: 15591
  source 1..203: mol_type = other DNA

SEQ ID NO: 32784 - DNA, 203 bp, synthetic construct; identical to SEQ ID NO: 15592
  source 1..203: mol_type = other DNA

SEQ ID NO: 32785 - DNA, 203 bp, synthetic construct; identical to SEQ ID NO: 15606
  source 1..203: mol_type = other DNA

SEQ ID NO: 32786 - DNA, 203 bp, synthetic construct; identical to SEQ ID NO: 15617
  source 1..203: mol_type = other DNA

SEQ ID NO: 32787 - DNA, 203 bp, synthetic construct; identical to SEQ ID NO: 15618
  source 1..203: mol_type = other DNA

SEQ ID NO: 32788 - DNA, 203 bp, synthetic construct; identical to SEQ ID NO: 15620
  source 1..203: mol_type = other DNA

SEQ ID NO: 32789 - DNA, 203 bp, synthetic construct; identical to SEQ ID NO: 15623
  source 1..203: mol_type = other DNA

SEQ ID NO: 32790 - DNA, 203 bp, synthetic construct; identical to SEQ ID NO: 15629
  source 1..203: mol_type = other DNA

SEQ ID NO: 32791 - DNA, 203 bp, synthetic construct; identical to SEQ ID NO: 15632
  source 1..203: mol_type = other DNA

SEQ ID NO: 32792 - DNA, 203 bp, synthetic construct; identical to SEQ ID NO: 15636
  source 1..203: mol_type = other DNA

SEQ ID NO: 32793 - DNA, 203 bp, synthetic construct; identical to SEQ ID NO: 15639
  source 1..203: mol_type = other DNA

SEQ ID NO: 32794 - DNA, 203 bp, synthetic construct; identical to SEQ ID NO: 15640
  source 1..203: mol_type = other DNA

SEQ ID NO: 32795 - DNA, 203 bp, synthetic construct; identical to SEQ ID NO: 15641
  source 1..203: mol_type = other DNA

SEQ ID NO: 32796 - DNA, 203 bp, synthetic construct; identical to SEQ ID NO: 15643
  source 1..203: mol_type = other DNA

SEQ ID NO: 32797 - DNA, 203 bp, synthetic construct; identical to SEQ ID NO: 15644
  source 1..203: mol_type = other DNA

SEQ ID NO: 32798 - DNA, 203 bp, synthetic construct; identical to SEQ ID NO: 15645
  source 1..203: mol_type = other DNA

SEQ ID NO: 32799 - DNA, 203 bp, synthetic construct; identical to SEQ ID NO: 15646
  source 1..203: mol_type = other DNA

SEQ ID NO: 32800 - DNA, 203 bp, synthetic construct; identical to SEQ ID NO: 15647
  source 1..203: mol_type = other DNA

SEQ ID NO: 32801 - DNA, 203 bp, synthetic construct; identical to SEQ ID NO: 15648
  source 1..203: mol_type = other DNA

SEQ ID NO: 32802 - DNA, 203 bp, synthetic construct; identical to SEQ ID NO: 15650
  source 1..203: mol_type = other DNA

SEQ ID NO: 32803 - DNA, 203 bp, synthetic construct; identical to SEQ ID NO: 15651
  source 1..203: mol_type = other DNA

SEQ ID NO: 32804 - DNA, 203 bp, synthetic construct; identical to SEQ ID NO: 15652
  source 1..203: mol_type = other DNA

SEQ ID NO: 32805 - DNA, 203 bp, synthetic construct; identical to SEQ ID NO: 15653
  source 1..203: mol_type = other DNA

SEQ ID NO: 32806 - DNA, 203 bp, synthetic construct; identical to SEQ ID NO: 15655
  source 1..203: mol_type = other DNA

SEQ ID NO: 32807 - DNA, 203 bp, synthetic construct; identical to SEQ ID NO: 15656
  source 1..203: mol_type = other DNA

SEQ ID NO: 32808 - DNA, 203 bp, synthetic construct; identical to SEQ ID NO: 15657
  source 1..203: mol_type = other DNA

SEQ ID NO: 32809 - DNA, 203 bp, synthetic construct; identical to SEQ ID NO: 15658
  source 1..203: mol_type = other DNA

SEQ ID NO: 32810 - DNA, 203 bp, synthetic construct; identical to SEQ ID NO: 15659
  source 1..203: mol_type = other DNA

SEQ ID NO: 32811 - DNA, 203 bp, synthetic construct; identical to SEQ ID NO: 15660
  source 1..203: mol_type = other DNA

SEQ ID NO: 32812 - DNA, 203 bp, synthetic construct; identical to SEQ ID NO: 15661
  source 1..203: mol_type = other DNA

SEQ ID NO: 32813 - DNA, 203 bp, synthetic construct; identical to SEQ ID NO: 15662
  source 1..203: mol_type = other DNA

SEQ ID NO: 32814 - DNA, 203 bp, synthetic construct; identical to SEQ ID NO: 15683
  source 1..203: mol_type = other DNA

SEQ ID NO: 32815 - DNA, 203 bp, synthetic construct; identical to SEQ ID NO: 15693
  source 1..203: mol_type = other DNA

SEQ ID NO: 32816 - DNA, 203 bp, synthetic construct; identical to SEQ ID NO: 15694
  source 1..203: mol_type = other DNA

SEQ ID NO: 32817 - DNA, 203 bp, synthetic construct; identical to SEQ ID NO: 15697
  source 1..203: mol_type = other DNA

SEQ ID NO: 32818 - DNA, 203 bp, synthetic construct; identical to SEQ ID NO: 15698
  source 1..203: mol_type = other DNA

SEQ ID NO: 32819 - DNA, 203 bp, synthetic construct; identical to SEQ ID NO: 15699
  source 1..203: mol_type = other DNA

SEQ ID NO: 32820 - DNA, 203 bp, synthetic construct; identical to SEQ ID NO: 15723
  source 1..203: mol_type = other DNA

SEQ ID NO: 32821 - DNA, 203 bp, synthetic construct; identical to SEQ ID NO: 15737
  source 1..203: mol_type = other DNA

SEQ ID NO: 32822 - DNA, 203 bp, synthetic construct; identical to SEQ ID NO: 15743
  source 1..203: mol_type = other DNA

SEQ ID NO: 32823 - DNA, 203 bp, synthetic construct; identical to SEQ ID NO: 15756
  source 1..203: mol_type = other DNA

SEQ ID NO: 32824 - DNA, 203 bp, synthetic construct; identical to SEQ ID NO: 15760
  source 1..203: mol_type = other DNA

SEQ ID NO: 32825 - DNA, 203 bp, synthetic construct; identical to SEQ ID NO: 15761
  source 1..203: mol_type = other DNA

SEQ ID NO: 32826 - DNA, 203 bp, synthetic construct; identical to SEQ ID NO: 15762
  source 1..203: mol_type = other DNA

SEQ ID NO: 32827 - DNA, 203 bp, synthetic construct; identical to SEQ ID NO: 15763
  source 1..203: mol_type = other DNA

SEQ ID NO: 32828 - DNA, 203 bp, synthetic construct; identical to SEQ ID NO: 15809
  source 1..203: mol_type = other DNA

SEQ ID NO: 32829 - DNA, 203 bp, synthetic construct; identical to SEQ ID NO: 15810
  source 1..203: mol_type = other DNA

SEQ ID NO: 32830 - DNA, 203 bp, synthetic construct; identical to SEQ ID NO: 15817
  source 1..203: mol_type = other DNA

SEQ ID NO: 32831 - DNA, 203 bp, synthetic construct; identical to SEQ ID NO: 15819
  source 1..203: mol_type = other DNA

SEQ ID NO: 32832 - DNA, 203 bp, synthetic construct; identical to SEQ ID NO: 15823
  source 1..203: mol_type = other DNA

SEQ ID NO: 32833 - DNA, 203 bp, synthetic construct; identical to SEQ ID NO: 15824
  source 1..203: mol_type = other DNA

SEQ ID NO: 32834 - DNA, 203 bp, synthetic construct; identical to SEQ ID NO: 15826
  source 1..203: mol_type = other DNA

SEQ ID NO: 32835 - DNA, 203 bp, synthetic construct; identical to SEQ ID NO: 15831
  source 1..203: mol_type = other DNA

SEQ ID NO: 32836 - DNA, 203 bp, synthetic construct; identical to SEQ ID NO: 15832
  source 1..203: mol_type = other DNA

SEQ ID NO: 32837 - DNA, 203 bp, synthetic construct; identical to SEQ ID NO: 15834
  source 1..203: mol_type = other DNA

SEQ ID NO: 32838 - DNA, 203 bp, synthetic construct; identical to SEQ ID NO: 15836
  source 1..203: mol_type = other DNA

SEQ ID NO: 32839 - DNA, 203 bp, synthetic construct; identical to SEQ ID NO: 15838
  source 1..203: mol_type = other DNA

SEQ ID NO: 32840 - DNA, 203 bp, synthetic construct; identical to SEQ ID NO: 15839
  source 1..203: mol_type = other DNA

SEQ ID NO: 32841 - DNA, 203 bp, synthetic construct; identical to SEQ ID NO: 15840
  source 1..203: mol_type = other DNA

SEQ ID NO: 32842 - DNA, 203 bp, synthetic construct; identical to SEQ ID NO: 15843
  source 1..203: mol_type = other DNA

SEQ ID NO: 32843 - DNA, 203 bp, synthetic construct; identical to SEQ ID NO: 15846
  source 1..203: mol_type = other DNA

SEQ ID NO: 32844 - DNA, 203 bp, synthetic construct; identical to SEQ ID NO: 15847
  source 1..203: mol_type = other DNA

SEQ ID NO: 32845 - DNA, 203 bp, synthetic construct; identical to SEQ ID NO: 15848
  source 1..203: mol_type = other DNA

SEQ ID NO: 32846 - DNA, 203 bp, synthetic construct; identical to SEQ ID NO: 15849
  source 1..203: mol_type = other DNA

SEQ ID NO: 32847 - DNA, 203 bp, synthetic construct; identical to SEQ ID NO: 15851
  source 1..203: mol_type = other DNA

SEQ ID NO: 32848 - DNA, 203 bp, synthetic construct; identical to SEQ ID NO: 15855
  source 1..203: mol_type = other DNA

SEQ ID NO: 32849 - DNA, 203 bp, synthetic construct; identical to SEQ ID NO: 15857
  source 1..203: mol_type = other DNA

SEQ ID NO: 32850 - DNA, 203 bp, synthetic construct; identical to SEQ ID NO: 15862
  source 1..203: mol_type = other DNA

SEQ ID NO: 32851 - DNA, 203 bp, synthetic construct; identical to SEQ ID NO: 15863
  source 1..203: mol_type = other DNA

SEQ ID NO: 32852 - DNA, 203 bp, synthetic construct; identical to SEQ ID NO: 15865
  source 1..203: mol_type = other DNA

SEQ ID NO: 32853 - DNA, 203 bp, synthetic construct; identical to SEQ ID NO: 15867
  source 1..203: mol_type = other DNA

SEQ ID NO: 32854 - DNA, 203 bp, synthetic construct; identical to SEQ ID NO: 15870
  source 1..203: mol_type = other DNA

SEQ ID NO: 32855 - DNA, 203 bp, synthetic construct; identical to SEQ ID NO: 15873
  source 1..203: mol_type = other DNA

SEQ ID NO: 32856 - DNA, 203 bp, synthetic construct; identical to SEQ ID NO: 15875
  source 1..203: mol_type = other DNA

SEQ ID NO: 32857 - DNA, 203 bp, synthetic construct; identical to SEQ ID NO: 15876
  source 1..203: mol_type = other DNA

SEQ ID NO: 32858 - DNA, 203 bp, synthetic construct; identical to SEQ ID NO: 15880
  source 1..203: mol_type = other DNA

SEQ ID NO: 32859 - DNA, 203 bp, synthetic construct; identical to SEQ ID NO: 15881
  source 1..203: mol_type = other DNA

SEQ ID NO: 32860 - DNA, 203 bp, synthetic construct; identical to SEQ ID NO: 15882
  source 1..203: mol_type = other DNA

SEQ ID NO: 32861 - DNA, 203 bp, synthetic construct; identical to SEQ ID NO: 15885
  source 1..203: mol_type = other DNA

SEQ ID NO: 32862 - DNA, 203 bp, synthetic construct; identical to SEQ ID NO: 15886
  source 1..203: mol_type = other DNA

SEQ ID NO: 32863 - DNA, 203 bp, synthetic construct; identical to SEQ ID NO: 15889
  source 1..203: mol_type = other DNA

SEQ ID NO: 32864 - DNA, 203 bp, synthetic construct; identical to SEQ ID NO: 15890
  source 1..203: mol_type = other DNA

SEQ ID NO: 32865 - DNA, 203 bp, synthetic construct; identical to SEQ ID NO: 15891
  source 1..203: mol_type = other DNA

SEQ ID NO: 32866 - DNA, 203 bp, synthetic construct; identical to SEQ ID NO: 15893
  source 1..203: mol_type = other DNA

SEQ ID NO: 32867 - DNA, 203 bp, synthetic construct; identical to SEQ ID NO: 15894
  source 1..203: mol_type = other DNA

SEQ ID NO: 32868 - DNA, 203 bp, synthetic construct; identical to SEQ ID NO: 15898
  source 1..203: mol_type = other DNA

SEQ ID NO: 32869 - DNA, 203 bp, synthetic construct; identical to SEQ ID NO: 15899
  source 1..203: mol_type = other DNA

SEQ ID NO: 32870 - DNA, 203 bp, synthetic construct; identical to SEQ ID NO: 15902
  source 1..203: mol_type = other DNA

SEQ ID NO: 32871 - DNA, 203 bp, synthetic construct; identical to SEQ ID NO: 15903
  source 1..203: mol_type = other DNA

SEQ ID NO: 32872 - DNA, 203 bp, synthetic construct; identical to SEQ ID NO: 15904
  source 1..203: mol_type = other DNA

SEQ ID NO: 32873 - DNA, 203 bp, synthetic construct; identical to SEQ ID NO: 15905
  source 1..203: mol_type = other DNA

SEQ ID NO: 32874 - DNA, 203 bp, synthetic construct; identical to SEQ ID NO: 15907
  source 1..203: mol_type = other DNA

SEQ ID NO: 32875 - DNA, 203 bp, synthetic construct; identical to SEQ ID NO: 15908
  source 1..203: mol_type = other DNA

SEQ ID NO: 32876 - DNA, 203 bp, synthetic construct; identical to SEQ ID NO: 15909
  source 1..203: mol_type = other DNA

SEQ ID NO: 32877 - DNA, 203 bp, synthetic construct; identical to SEQ ID NO: 15910
  source 1..203: mol_type = other DNA

SEQ ID NO: 32878 - DNA, 203 bp, synthetic construct; identical to SEQ ID NO: 15911
  source 1..203: mol_type = other DNA

SEQ ID NO: 32879 - DNA, 203 bp, synthetic construct; identical to SEQ ID NO: 15912
  source 1..203: mol_type = other DNA

SEQ ID NO: 32880 - DNA, 203 bp, synthetic construct; identical to SEQ ID NO: 15913
  source 1..203: mol_type = other DNA

SEQ ID NO: 32881 - DNA, 203 bp, synthetic construct; identical to SEQ ID NO: 15914
  source 1..203: mol_type = other DNA

SEQ ID NO: 32882 - DNA, 203 bp, synthetic construct; identical to SEQ ID NO: 15915
  source 1..203: mol_type = other DNA

SEQ ID NO: 32883 - DNA, 203 bp, synthetic construct; identical to SEQ ID NO: 15916
  source 1..203: mol_type = other DNA

SEQ ID NO: 32884 - DNA, 203 bp, synthetic construct; identical to SEQ ID NO: 15917
  source 1..203: mol_type = other DNA

SEQ ID NO: 32885 - DNA, 203 bp, synthetic construct; identical to SEQ ID NO: 15918
  source 1..203: mol_type = other DNA

SEQ ID NO: 32886 - DNA, 203 bp, synthetic construct; identical to SEQ ID NO: 15919
  source 1..203: mol_type = other DNA

SEQ ID NO: 32887 - DNA, 203 bp, synthetic construct; identical to SEQ ID NO: 15920
  source 1..203: mol_type = other DNA

SEQ ID NO: 32888 - DNA, 203 bp, synthetic construct; identical to SEQ ID NO: 15921
  source 1..203: mol_type = other DNA

SEQ ID NO: 32889 - DNA, 203 bp, synthetic construct; identical to SEQ ID NO: 15922
  source 1..203: mol_type = other DNA

SEQ ID NO: 32890 - DNA, 203 bp, synthetic construct; identical to SEQ ID NO: 15923
  source 1..203: mol_type = other DNA

SEQ ID NO: 32891 - DNA, 203 bp, synthetic construct; identical to SEQ ID NO: 15924
  source 1..203: mol_type = other DNA

SEQ ID NO: 32892 - DNA, 203 bp, synthetic construct; identical to SEQ ID NO: 15925
  source 1..203: mol_type = other DNA

SEQ ID NO: 32893 - DNA, 203 bp, synthetic construct; identical to SEQ ID NO: 15926
  source 1..203: mol_type = other DNA

SEQ ID NO: 32894 - DNA, 203 bp, synthetic construct; identical to SEQ ID NO: 15927
  source 1..203: mol_type = other DNA

SEQ ID NO: 32895 - DNA, 203 bp, synthetic construct; identical to SEQ ID NO: 15928
  source 1..203: mol_type = other DNA

SEQ ID NO: 32896 - DNA, 203 bp, synthetic construct; identical to SEQ ID NO: 15929
  source 1..203: mol_type = other DNA

SEQ ID NO: 32897 - DNA, 203 bp, synthetic construct; identical to SEQ ID NO: 15930
  source 1..203: mol_type = other DNA

SEQ ID NO: 32898 - DNA, 203 bp, synthetic construct; identical to SEQ ID NO: 15932
  source 1..203: mol_type = other DNA

SEQ ID NO: 32899 - DNA, 203 bp, synthetic construct; identical to SEQ ID NO: 15933
  source 1..203: mol_type = other DNA

SEQ ID NO: 32900 - DNA, 203 bp, synthetic construct; identical to SEQ ID NO: 15934
  source 1..203: mol_type = other DNA

SEQ ID NO: 32901 - DNA, 203 bp, synthetic construct; identical to SEQ ID NO: 15937
  source 1..203: mol_type = other DNA

SEQ ID NO: 32902 - DNA, 203 bp, synthetic construct; identical to SEQ ID NO: 15938
  source 1..203: mol_type = other DNA

SEQ ID NO: 32903 - DNA, 203 bp, synthetic construct; identical to SEQ ID NO: 15939
  source 1..203: mol_type = other DNA

SEQ ID NO: 32904 - DNA, 203 bp, synthetic construct; identical to SEQ ID NO: 15941
  source 1..203: mol_type = other DNA

SEQ ID NO: 32905 - DNA, 203 bp, synthetic construct; identical to SEQ ID NO: 15942
  source 1..203: mol_type = other DNA

SEQ ID NO: 32906 - DNA, 203 bp, synthetic construct; identical to SEQ ID NO: 15943
  source 1..203: mol_type = other DNA

SEQ ID NO: 32907 - DNA, 203 bp, synthetic construct; identical to SEQ ID NO: 15944
  source 1..203: mol_type = other DNA

SEQ ID NO: 32908 - DNA, 203 bp, synthetic construct; identical to SEQ ID NO: 15946
  source 1..203: mol_type = other DNA

SEQ ID NO: 32909 - DNA, 203 bp, synthetic construct; identical to SEQ ID NO: 15947
  source 1..203: mol_type = other DNA

SEQ ID NO: 32910 - DNA, 203 bp, synthetic construct; identical to SEQ ID NO: 15948
  source 1..203: mol_type = other DNA

SEQ ID NO: 32911 - DNA, 203 bp, synthetic construct; identical to SEQ ID NO: 15950
  source 1..203: mol_type = other DNA

SEQ ID NO: 32912 - DNA, 203 bp, synthetic construct; identical to SEQ ID NO: 15954
  source 1..203: mol_type = other DNA

SEQ ID NO: 32913 - DNA, 203 bp, synthetic construct; identical to SEQ ID NO: 15955
  source 1..203: mol_type = other DNA

SEQ ID NO: 32914 - DNA, 203 bp, synthetic construct; identical to SEQ ID NO: 15958
  source 1..203: mol_type = other DNA

SEQ ID NO: 32915 - DNA, 203 bp, synthetic construct; identical to SEQ ID NO: 15959
  source 1..203: mol_type = other DNA

SEQ ID NO: 32916 - DNA, 203 bp, synthetic construct; identical to SEQ ID NO: 15960
  source 1..203: mol_type = other DNA

SEQ ID NO: 32917 - DNA, 203 bp, synthetic construct; identical to SEQ ID NO: 15961
  source 1..203: mol_type = other DNA

SEQ ID NO: 32918 - DNA, 203 bp, synthetic construct; identical to SEQ ID NO: 15962
  source 1..203: mol_type = other DNA

SEQ ID NO: 32919 - DNA, 203 bp, synthetic construct; identical to SEQ ID NO: 15963
  source 1..203: mol_type = other DNA

SEQ ID NO: 32920 - DNA, 203 bp, synthetic construct; identical to SEQ ID NO: 15967
  source 1..203: mol_type = other DNA

SEQ ID NO: 32921 - DNA, 203 bp, synthetic construct; identical to SEQ ID NO: 15968
  source 1..203: mol_type = other DNA

SEQ ID NO: 32922 - DNA, 203 bp, synthetic construct; identical to SEQ ID NO: 15973
  source 1..203: mol_type = other DNA

SEQ ID NO: 32923 - DNA, 203 bp, synthetic construct; identical to SEQ ID NO: 15975
  source 1..203: mol_type = other DNA

SEQ ID NO: 32924 - DNA, 203 bp, synthetic construct; identical to SEQ ID NO: 15976
  source 1..203: mol_type = other DNA

SEQ ID NO: 32925 - DNA, 203 bp, synthetic construct; identical to SEQ ID NO: 15977
  source 1..203: mol_type = other DNA

SEQ ID NO: 32926 - DNA, 203 bp, synthetic construct; identical to SEQ ID NO: 15979
  source 1..203: mol_type = other DNA

SEQ ID NO: 32927 - DNA, 203 bp, synthetic construct; identical to SEQ ID NO: 15985
  source 1..203: mol_type = other DNA

SEQ ID NO: 32928 - DNA, 203 bp, synthetic construct; identical to SEQ ID NO: 15994
  source 1..203: mol_type = other DNA

SEQ ID NO: 32929 - DNA, 203 bp, synthetic construct; identical to SEQ ID NO: 15995
  source 1..203: mol_type = other DNA

SEQ ID NO: 32930 - DNA, 203 bp, synthetic construct; identical to SEQ ID NO: 15998
  source 1..203: mol_type = other DNA

SEQ ID NO: 32931 - DNA, 203 bp, synthetic construct; identical to SEQ ID NO: 15999
  source 1..203: mol_type = other DNA

SEQ ID NO: 32932 - DNA, 203 bp, synthetic construct; identical to SEQ ID NO: 16000
  source 1..203: mol_type = other DNA

SEQ ID NO: 32933 - DNA, 203 bp, synthetic construct; identical to SEQ ID NO: 16010
  source 1..203: mol_type = other DNA

SEQ ID NO: 32934 - DNA, 203 bp, synthetic construct; identical to SEQ ID NO: 16012
  source 1..203: mol_type = other DNA

SEQ ID NO: 32935 - DNA, 203 bp, synthetic construct; identical to SEQ ID NO: 16013
  source 1..203: mol_type = other DNA

SEQ ID NO: 32936 - DNA, 203 bp, synthetic construct; identical to SEQ ID NO: 17158
  source 1..203: mol_type = other DNA

SEQ ID NO: 32937 - DNA, 203 bp, synthetic construct; identical to SEQ ID NO: 17186
  source 1..203: mol_type = other DNA

SEQ ID NO: 32938 - DNA, 203 bp, synthetic construct; identical to SEQ ID NO: 17189
  source 1..203: mol_type = other DNA

SEQ ID NO: 32939 - DNA, 203 bp, synthetic construct; identical to SEQ ID NO: 17192
  source 1..203: mol_type = other DNA

SEQ ID NO: 32940 - DNA, 203 bp, synthetic construct; identical to SEQ ID NO: 17193
  source 1..203: mol_type = other DNA

SEQ ID NO: 32941 - DNA, 203 bp, synthetic construct; identical to SEQ ID NO: 17194
  source 1..203: mol_type = other DNA

SEQ ID NO: 32942 - DNA, 203 bp, synthetic construct; identical to SEQ ID NO: 17195
  source 1..203: mol_type = other DNA

SEQ ID NO: 32943 - DNA, 203 bp, synthetic construct; identical to SEQ ID NO: 17196
  source 1..203: mol_type = other DNA

SEQ ID NO: 32944 - DNA, 203 bp, synthetic construct; identical to SEQ ID NO: 17197
  source 1..203: mol_type = other DNA

SEQ ID NO: 32945 - DNA, 203 bp, synthetic construct; identical to SEQ ID NO: 17198
  source 1..203: mol_type = other DNA

SEQ ID NO: 32946 - DNA, 203 bp, synthetic construct; identical to SEQ ID NO: 17200
  source 1..203: mol_type = other DNA

SEQ ID NO: 32947 - DNA, 240 bp, synthetic construct
  source 1..240: mol_type = other DNA
cacctacggaaaccttgttacgacttttacttcctctagatagtcaagttcgaccgtcttctcagcgctccgccagggccgtgggccgaccccggcggggccgatccgagggcctcactaaaccatccaatcggtagtagcgacgggcggtgtgtacaaagggcagggacttaatcaacgcaagcttatgacccgcacttactgggaattcctcgttcatggggaataattgcaatcccc

SEQ ID NO: 32948 - DNA, 116 bp, synthetic construct
  source 1..116: mol_type = other DNA
gggacgccgaccgctcgggggtcgcgtaactagttagcatgccagagtctcgttcgttatcggaattaaccagacaaatcgctccaccaactaagaacggccatgcaccaccaccc

SEQ ID NO: 32949 - DNA, 296 bp, synthetic construct
  source 1..296: mol_type = other DNA
gtttatggtcggaactacgacggtatctgatcgtcttcgaacctccgactttcgttcttgattaatgaaaacattcttggcaaatgctttcgctctggtccgtcttgcgccggtccaagaatttcacctctagcggcgcaatacgaatgcccccggccgtccctcttaatcatggcctcagttccgaaaaccaacaaaatagaaccgcggtcctattccattattcctagctgcggtatccaggcggctcgggcctgctttgaacactctaattttttcaaagtaaacgcttcggg

SEQ ID NO: 32950 - DNA, 80 bp, synthetic construct
  source 1..80: mol_type = other DNA
agagcatcgagggggcgccgagaggcaaggggcggggacgggcggtggctcgcctcgcggcggaccgcccgcccgctccc

SEQ ID NO: 32951 - DNA, 10 bp, synthetic construct
  source 1..10: mol_type = other DNA
tacgagcttt

SEQ ID NO: 32952 - DNA, 120 bp, synthetic construct
  source 1..120: mol_type = other DNA
atacgctattggagctggaattaccgcggctgctggcaccagacttgccctccaatggatcctcgttaaaggatttaaagtggactcattccaattacagggcctcgaaagagtcctgta

SEQ ID NO: 32953 - DNA, 80 bp, synthetic construct
  source 1..80: mol_type = other DNA
gggggcgtgcgatcggcccgaggttatctagagtcaccaaagccgccggcgcccgccccccggccggggccggagagggg

SEQ ID NO: 32954 - DNA, 174 bp, synthetic construct
  source 1..174: mol_type = other DNA
catcctcctgctgaagtgacaagccacgctgcttctggagccaaagctgaccaagaagaacaaatccaccccagatctagactcaggtcacctcctgaagccctcgttcagggtcgatatccccacatcaaggacggtgaggatcttaaagaccactcaacagaaagtaaaaaa

SEQ ID NO: 32955 - DNA, 174 bp, synthetic construct
  source 1..174: mol_type = other DNA
gcagaagggaaacgtgaagaaggtgaagatggcggtggccagggccggggtcttgggagtccagtggctgcaaagggcatcccggaacgtgatgccgctgggcgcacggacagcctcccacatgaccaaggacatgttcccggggccctatcctaggaccccagaagaacgggc

SEQ ID NO: 32956 - DNA, 174 bp, synthetic construct
  source 1..174: mol_type = other DNA
agactcgggaactgcctgaatgtggtttgggacacgagacctcatcatattgatgagcgaacaaacaagaacatttcctccctcccctcctttgaattgaaatggcacattaagacttgtcacggcttctcactgggactggagacctcgttccttcaccccgcgtgtcgccag

SEQ ID NO: 32957 - DNA, 174 bp, synthetic construct
  source 1..174: mol_type = other DNA
aggtgggcggtggcggtaggtgggtggccagcgactggcaacgcggtggcttagacgcgcgagatccggccagggtcagagtactgtaagattgatgttaaaggcatggtgttcaccccacttcatcagcgtacataagttatctcttcttttggacccttattttatgccata

SEQ ID NO: 32958 - DNA, 174 bp, synthetic construct
  source 1..174: mol_type = other DNA
ggaggcaggttgatgtgtttgtgcttccttctacagccaatatgaaaaggcctagtaagtggggtcgggaggcgggcgtggagggacccacgtctggaagttgctgcagccaccacgacgctcttctacggctacggctttgtctctgctgagttaaagaaagcaagtaaacgc

SEQ ID NO: 32959 - DNA, 174 bp, synthetic construct
  source 1..174: mol_type = other DNA
atttataagcaatagtagcttatttggctcacagttctggaggctgagaagatcgtgaggctgcatctggcaagggccttcttgctgcttcataacatggcagaagacatcatgcgggtgtgtgtctggggaagagacttacagaagtggagttgctgagtcaaagatctaacc

SEQ ID NO: 32960 - DNA, 174 bp, synthetic construct
  source 1..174: mol_type = other DNA
tcttttggtgcagaaggtgacgggaaacaggccgcagacctgaacttccaaccgtatgtaggcgagaagccggtgccgatactcccactatcccacaatgtcccactgggccccagagtggaagagggcggaggctaatccaagagaccttggggccagctgggatgtcagggg

SEQ ID NO: 32961 - DNA, 174 bp, synthetic construct
  source 1..174: mol_type = other DNA
atccaccatgaagcagaatctaaagaaaaaggtccaagcatgaaggaaccaaatccaatttctccaccaattttccatggtctggacaccctaaccgtgatgggcattgcgtttgcagcctttgtgatcggagcactcctgacgggggccttgtggtacatctattctcacaca

SEQ ID NO: 32962 - DNA, 174 bp, synthetic construct
  source 1..174: mol_type = other DNA
cagattagaggacgggcgctttggagccggccccaggcagcgtgtgtcggtcgcctagtctggagaactagtcctcgactcacgtgcaaggatgatgctgaaaggaataacaaggcttatctctaggatccataaggccaagcatggggatcagcacgagggtcagcactacaa

SEQ ID NO: 32963 - DNA, 174 bp, synthetic construct
  source 1..174: mol_type = other DNA
ctctcgggggccaggggtcatcggtttgacccctgacctataagccaagataccccataaacacactcagaaagcagagaaaaaggacaagagtctgtgtttgagagggggtctgccattcctgcttggggactggtggggaagagggccaggacatcttctgagccaggacgt

SEQ ID NO: 32964 - DNA, 174 bp, synthetic construct
  source 1..174: mol_type = other DNA
agtctggctgcggcggcagagctgaagtgagcggagccaccaggaggccatgtcgggtgaggacgctgaggtccgggcagtctctgaagatgtctccaatggaagcagtggctcgcccagccctggggacacactgccctggaaccttgggaaaacgcagcggagccggcgcag

SEQ ID NO: 32965 - DNA, 174 bp, synthetic construct
  source 1..174: mol_type = other DNA
atctgcctcagcctctttgtcactgcctggaccattgtccctgctgtttctcagacagcatagaggctgaggctggggccaggacccagacagagacacacggtcactgcagctgaagccgctgcccctgctacaggcaccaccaggaccagctgatcattccagcccacagca

SEQ ID NO: 32966 - DNA, 174 bp, synthetic construct
  source 1..174: mol_type = other DNA
ctcaggctgtggccccacctgcccccaagcccacccaggctggggaaggaacgctgtcagaggccctgctgcagctgcagtttgatgatgaagacctgggggccttgcttggcaacagcacagacccagctgtgttcacagacctggcatccgtcgacaactccgagtttcagc

SEQ ID NO: 32967 - DNA, 174 bp, synthetic construct
  source 1..174: mol_type = other DNA
ctcaaggttttgaagagacaggggacacgctctatgccccctattccacacattttcagctgcagaaccagcctccccaaaaggaattctccatcccacgggcccacgcttggccgagcccttacaaagactatgaagtaaagaaagagggcagctaactctgtcctgaagagt

SEQ ID NO: 32968 - DNA, 174 bp, synthetic construct
  source 1..174: mol_type = other DNA
gcttccgtagaggccagctggttgctacgcagcaacaggaaacattccgcgctaccgagtactttctactcccgaccaggcattgctctctctggagaccctcggcggtggttgctgtattttgacttggagtaaggatgacttttcgggccacagatagtgaatttgacctga

SEQ ID NO: 32969 - DNA, 174 bp, synthetic construct
  source 1..174: mol_type = other DNA
ctggagggccgcactcccgttccagccaggctgagccttctgtcccctgcctctggggcctgggaaccccccttcttctttctcctgaatggcacccccgccctagaatccagacaccgagtttcccactgtggctggttcaaggagctccctggtgacagtctgtggctgagc

SEQ ID NO: 32970 - DNA, 174 bp, synthetic construct
  source 1..174: mol_type = other DNA
tagagtggggggtggaagatgattctcgcctgttgctggggatttatgaacatggctatggaaactgggagttaattaaaacagacccagagcttaaattaactgacaaaattctgccggtggagacagataaaaagcctcaggggaagcagctacagacccgagcggattact

SEQ ID NO: 32971 - DNA, 174 bp, synthetic construct
  source 1..174: mol_type = other DNA
agcggctgcagcatccagccagcttggatgtctggcctgtgagcctggggaaactattattaataatatttactgttgataatattggggaaaacagcccttaactctgaggtttctgctgtgctcctttccaaaacagacttccaggactctgaagaaacagttacaagcagg

SEQ ID NO: 32972 - DNA, 174 bp, synthetic construct
  source 1..174: mol_type = other DNA
aagggaggaggcgccgagctgaccgggcgacgccgcgggaggttctggaaacgccgggagctgcgagtgtccagacacttccctctgtgaccatgaaactctgggtgtctgcattgctgatggcctggtttggtgtcctgagctgtgtgcaggccgaattcttcacctctattg

SEQ ID NO: 32973 - DNA, 174 bp, synthetic construct
  source 1..174: mol_type = other DNA
gcgaactgaaggtggcccaagggaaggctctgcaagagaatttggccctcctgacccagaccctagctgaaagagaagaggaggtggagactctgcggggacaaatccaggaactggagaagcaacgggaaatgcagaaggctgctttggaattgctgtctctggacctgaaga

SEQ ID NO: 32974 - DNA, 174 bp, synthetic construct
  source 1..174: mol_type = other DNA
aggaagccgaggaaggctgtgtttctgactcacacgggggagtcgggggagtcgtaaacaaccctgaagagaacagccaggcctggcgctctgggcttggtcctgggacacccgtttgacactgtaaaggtgaggctgcagacccagaccacctaccggggcatcgttgattgc

SEQ ID NO: 32975 - DNA, 174 bp, synthetic construct
  source 1..174: mol_type = other DNA
ctgcctcccccccgctcccgctcccctgagcccagccagaccccgcgccgcccgcgccccgctcgactccggaggctcccgcagccccggcgtccgccccgctgccccctcccccgggggccatgggggcgcccccgggctaccggccctcagcttgggtgcatctcctccacc

SEQ ID NO: 32976 - DNA, 174 bp, synthetic construct
  source 1..174: mol_type = other DNA
ctcagtgaagcaacgaggatgccggggagagggaaggggctgggctctgggcggtgccaagtctgtgagggggcgcggtcaccgcccagggttcccacgaacgccaaggcggccacgtcctgctccccctggtgaagaagctgccctgggcttgtcgtcctagggtctccagac

SEQ ID NO: 32977 - DNA, 174 bp, synthetic construct
  source 1..174: mol_type = other DNA
ctgatgtgagctagtttgtctggttgagttggatgtttaaatagaaggcagaacaacaacaggtactccacatcagcattctcaagactggagaagttaggcctcagacatcccaagccttctcctttcattggaaacttgacatttttccgccagggtttttgggaaagccaa

SEQ ID NO: 32978 - DNA, 174 bp, synthetic construct
  source 1..174: mol_type = other DNA
gccacattccacactaacgtgttggtgaattcttctgggcattgccagtacctgcctccaggcatattcaagagttcctgctacatcgatgtacgctggtttccctttgatgtgcagcactgcaaactgaagtttgggtcctggtcttacggaggctggtccttggatctgcag

SEQ ID NO: 32979 - DNA, 174 bp, synthetic construct
  source 1..174: mol_type = other DNA
tcctgcctcggcaaccccgggccctgagggcaggccccaaccgcggaggagcaggagagggcggaggccggcgggccatgccctggtcgtcccgcggcgccctccttcgggacctggtcctgggcgtgctgggcaccgccgccttcctgctcgacctgggcaccgacctgtggg

SEQ ID NO: 32980 - DNA, 174 bp, synthetic construct
  source 1..174: mol_type = other DNA
aagtttgaaactggtaacttcgggagttgagccacgagctgttgtgcatccagaggtggaattggggcccggcattccctcctcgtcccgggctggcccttgcccccaccctgcaactcctggttgagatgggctcagccaagagcgtcccagtcacaccagcgcggcctccgc

SEQ ID NO: 32981 - DNA, 174 bp, synthetic construct
  source 1..174: mol_type = other DNA
agccttcgctggatctccttcccgaactcacaaatcctgacgagctcctgtcttatctggacccccccgacctgccgagcaatagtaacgatgacctcctgtctctatttgagaacaactgagggccacccggtcggggccatccctccacactctgcatcctaccccacctac

SEQ ID NO: 32982 - DNA, 174 bp, synthetic construct
  source 1..174: mol_type = other DNA
tttttagaggttggttgttgtgttttaggattctgtccattttcttttaaagttataaacacgtacttgtgcgaattatttttttaaagtgatttgccatttttgaaagcgtatttaatgatagaatactatcgagccaacatgtactgacatggaaagatgtcaaagatatgt

SEQ ID NO: 32983 - DNA, 174 bp, synthetic construct
  source 1..174: mol_type = other DNA
agccagcggacgtccaggaaccgggatgcctccagcagtgaggcggtcagcctgcagcatgggatggctgtggatctttggggcagccctggggcagtgtctgggctacagttcacagcagcaaagggtgccatttcttcagcctcccggtcaaagtcaactgcaagcgagtta

SEQ ID NO: 32984 - DNA, 174 bp, synthetic construct
  source 1..174: mol_type = other DNA
gggaccaggaactggaggctctgcagcaagaacagcagcaggcccagggacaggaggagagggtgaaggaaaaggcagacgccctccagggagctctggagcaagcccatatgacactgaaggagcgtcatggagagcttcaggaccacaaggaacaggcacgaaggctggagg

SEQ ID NO: 32985 - DNA, 174 bp, synthetic construct
  source 1..174: mol_type = other DNA
ctactccggagcctgaggtgggaggatcgcttgagtctgggaggcagaggctgcattgagctatgatcatggcactgcattccagcctgggtgacagtgcaagaccttgtctcagaataaataaagtatgtgatgaagatgtgcatacattatatgcaaatactgttttttttt

SEQ ID NO: 32986 - DNA, 174 bp, synthetic construct
  source 1..174: mol_type = other DNA
caccaattcggctggcgtctccgagaccgcggactcccgtagggtccccgtggccccgagttgtagtcgggacaccccggccgcgggtgatcgtcgggtctccacgcgcccgggtcgctgacgcggatccggcctcggcgccttctcagggcgccctgcaaggccgcaggcagg

SEQ ID NO: 32987 - DNA, 174 bp, synthetic construct
  source 1..174: mol_type = other DNA
cctcctctctggctaatcaacagctgcccccagcctgtggtgccaggcaactcagcaagctgaaaaggttccttactaccctgcagcagtttggcaatgacatttcacccgagataggagaaagagttcgcaccctcgttctgggactagtgaactccactttgacaattgaag

SEQ ID NO: 32988 - DNA, 174 bp, synthetic construct
  source 1..174: mol_type = other DNA
tttagtgtcacaggagacacgagggcaaagtgctgaggaaactctagagcaacatcggaatgcatggtgaagcatcagatggtgaaggagaaggagacacagaagtgatgcagcaggagacagttccagttcctgtaccttcagagaaaaccaaacagcctaaagaatgttttt

SEQ ID NO: 32989 - DNA, 174 bp, synthetic construct
  source 1..174: mol_type = other DNA
gccacttctcttcccttcattcttcgccaggctctctgctgactcaagttcttcagttcacgatcttctagttgcagcgatgagtgcacgagtgagatcaagatccagaggaagaggagatggtcaggaggctcccgatgtggttgcattcgtggctcccggtgaatctcagca

SEQ ID NO: 32990 - DNA, 174 bp, synthetic construct
  source 1..174: mol_type = other DNA
cttcaacttggcaacagttgcctggggtagctctacacaactctgtccagcccacagcaatgattccagaggccatggggagtggacagcagctagctgactggaggaatgcccactctcatggcaaccagtacagcactatcatgcagcagccatccttgctgactaaccatg

SEQ ID NO: 32991 - DNA, 174 bp, synthetic construct
  source 1..174: mol_type = other DNA
caccctgacccaagccgagacaggttccaaacctcaacctgcagccggaagggggaagtgaaactcggctgggggtgggggctcagaagccgccccagaaagcactgaaagccacagcacgtacacccactccagggatctgccagcaccctgtggggcccagactacaggctg

SEQ ID NO: 32992 - DNA, 174 bp, synthetic construct
  source 1..174: mol_type = other DNA
gggacgccattgtgattggggcggggatccagggctgcttcactgcataccacctggccaaacacaggaagaggatcctcctgctggagcagttctttctaccacactcccgaggaagctcccatggacaaagccggataatccgaaaggcgtacctggaagacttttacaccc

SEQ ID NO: 32993 - DNA, 174 bp, synthetic construct
  source 1..174: mol_type = other DNA
caccgtagtgcttagaggccgaaaaagtacagccccttccgggctccgcggtacgggaagacagctttgggatgtcggaagatcctagaggtcccaaggtaccacgaaaggcagtggtagaaaagccagctcgggcagcagagcgagaggcccgggccctgctggagaagaacc

SEQ ID NO: 32994 - DNA, 174 bp, synthetic construct
  source 1..174: mol_type = other DNA
attggctgagcccggctgtcagtcctttcgcgcctcggcggcgcggcatagcccggctcggcctgtaaagcagtctcaagcctgccgcagggagaagatggcggtcgccgtgagaactttgcaggaacagctggaaaaggccaaagagagtcttaagaacgtggatgagaacat

SEQ ID NO: 32995 - DNA, 174 bp, synthetic construct
  source 1..174: mol_type = other DNA
acaaggagactgggaggtgtctcaagtgcctgtaccacacggaaggggaacactgtcagttctgccggtttggatactatggtgatgccctccagcaggactgtcgaaagtgtgtctgtaattacctgggcaccgtgcaagagcactgtaacggctctgactgccagtgcgaca

SEQ ID NO: 32996 - DNA, 174 bp, synthetic construct
  source 1..174: mol_type = other DNA
gaggaaggagagagtggaggaggagggctttgggttagggagagtgctttcgtttgttttaaatgggagaaactggagcatgttgccaagggcagagagccagcagagaggggtgaatggaagaaggagcgagaagggggttactgacgaagccttatcctggaggagagaagg

SEQ ID NO: 32997 - DNA, 174 bp, synthetic construct
  source 1..174: mol_type = other DNA
caagtggtcctgtcgaagtatttatcactgagactccgagtcagcccaactcccaccccatccagtggaatgcaccacagccatctcacatttccaagtacattctcaggtggagacctaaaaattctgtaggccgttggaaggaagctaccataccaggccacttaaactcct

SEQ ID NO: 32998 - DNA, 174 bp, synthetic construct
  source 1..174: mol_type = other DNA
ctagaccaaagggtgcggctgctgcagaggtggctgatgcaggtttccatccttggggaatgaccacgcaactgggcccagccctggtgctgggggtggccctgtgcctgggttgtggccagcccctaccacaggtccctgaacgccccttctctgtgctgtggaatgtaccct

SEQ ID NO: 32999 - DNA, 174 bp, synthetic construct
  source 1..174: mol_type = other DNA
atctccagccattgctcctccaacagagaccatggctcctccagtcagggatcctgttcctgggaaacccacggtcaccatccggactcgaggcgccattattcaaaccccaaccctaggccccatccagcctactcgggtgtcagaagctggcaccacagttcctggccagat

SEQ ID NO: 33000 - DNA, 174 bp, synthetic construct
  source 1..174: mol_type = other DNA
ggaggcaggcggtgccgcggcgccgggacccgactcatccggtgcttgcgtgtggtggtgagcgcagcgccgaggatgaggaggtgcaacagcggctccgggccgccgccgtcgctgctgctgctgctgctgtggctgctcgcggttcccggcgctaacgcggccccgcggtcg

SEQ ID NO: 33001 - DNA, 174 bp, synthetic construct
  source 1..174: mol_type = other DNA
cacccccaccgacctctcggagacaggaatccgctctgcccctgcatcctcctctgctcacccttctctcagtagtgtttgtcagacaccagtccggacctcagctctcgatctagttcccgagtaagatttagctcccgggaaagcgtgcctgaaacaagccggagtgagcct

SEQ ID NO: 33002 - DNA, 174 bp, synthetic construct
  source 1..174: mol_type = other DNA
cctgtaccataaccaggaggctgatggttgctcaggcctccctcaaactagccaatgagaagtgcacgggtcctggtcgcctaggaaaccgcgtgacaacaagatggcggcgctgcgggacggctagcggccctgcgtgggagttcctgacagctggattctagaagtagaact

SEQ ID NO: 33003 - DNA, 174 bp, synthetic construct
  source 1..174: mol_type = other DNA
ttccccggaagtgttggttaaagcccctccaatcagcggctcggtgcggcaagtttgaatttcgtggaggctcgggttgtgagggttcctgcttcggagtcggcggtggtcgtccagaccgagtgttctttactttttgtttggttgaggtttcacgctagaaggtggctcagg

SEQ ID NO: 33004 - DNA, 174 bp, synthetic construct
  source 1..174: mol_type = other DNA
ctgtccatacactctctcatcatcctgttccttggattggacttcactaagcaatttatcactcaccttcagacttacatgtgggagttttcacaacagtagttttggaatcattagaacttggattgatttcatcatttaacagaaacaaacagcccaaattactttatcacc

SEQ ID NO: 33005 - DNA, 174 bp, synthetic construct
  source 1..174: mol_type = other DNA
gagctccagcctccaggcacccgggatccagcgccgccgctcataacacccgcgaccccgcagctaagcgcagctcccgacgcaatggacccggcgctggcagcccagatgagcgaggctgtggccgagaagatgctccagtaccggcgggacacagcaggctggaagatttgc

SEQ ID NO: 33006 - DNA, 174 bp, synthetic construct
  source 1..174: mol_type = other DNA
tgttgactcatgcaaatgaggtatctgaactgcagcttcagtattagcagagccacaggccgcctctgtggcatcaccagggtttctctgaagaagagggtctgcattttcctaaacccagtgctgctctcccatctcccatcttcctctcgcagcttgatgagccccggtgtg

SEQ ID NO: 33007 - DNA, 174 bp, synthetic construct
  source 1..174: mol_type = other DNA
tgccccagccctcagggccgccagcaaggaagaaatttgtgatacccctcgacgaggatgaggtccctcctggagtggccaagcccttattccgatctacacagagccttcccactgtggacacctcggcccaggcggcccctcagacctacgccgaatatgccatctcacagc

SEQ ID NO: 33008 - DNA, 174 bp, synthetic construct
  source 1..174: mol_type = other DNA
gagaggccggcgtctctcccccagtttgccgttcacccggagcgctcgggacttgccgatagtggtgacggcggcaacatgtctgtggctttcgcggccccgaggcagcgaggcaagggggagatcactcccgctgcgattcagaagatgttggatgacaataaccatcttatt

SEQ ID NO: 33009 - DNA, 174 bp, synthetic construct
  source 1..174: mol_type = other DNA
aaccccaaccctaggccccatccagcctactcgggtgtcagaagctggcaccacagttcctggccagattcgcccaacgatgaccattcctggctatgtggagcctactgcagttgctacccctcccacaaccaccaccaagaagccacgagtatccacaccaaaaccagcaac

SEQ ID NO: 33010 - DNA, 174 bp, synthetic construct
  source 1..174: mol_type = other DNA
ctgcagcatcttctacgtcgggaccacagcctccgcctccacaaagcctgaacctcctttcgcaggctcagctgcaggcacagcctcttgcgccaggcggaactcaaatgaaaaagaaaagtggcttccagataactagcgttactcctgctcagatctccgctagtatcagct

SEQ ID NO: 33011 - DNA, 174 bp, synthetic construct
  source 1..174: mol_type = other DNA
ccaatacctgggatccattgcctctccttctgtgcacccagcaacgcccatttcacctggacgtgccagcggcatgacaaccctctctgcagaactttccagtcgactctcaacggcacccgacctgacagcgttcagcgacccgcgccagttccccgcgctgccctccatctc

SEQ ID NO: 33012 - DNA, 174 bp, synthetic construct
  source 1..174: mol_type = other DNA
tctcttgcttcaacagtgtttggacggaacagatccggggactctcttccagcctccgaccgccctccgatttcctctccgcttgcaacctccgggaccatcttctcggccatctcctgcttctgggacctgccagcaccgtttttgtggttagctccttcttgccaaccaacc

SEQ ID NO: 33013 - DNA, 174 bp, synthetic construct
  source 1..174: mol_type = other DNA
agttacctctcccctttcacgtagttttcatttgtggtgagattctctcccaggccacaagacatttcctgctcggaaccttgtttactaatttccactgcttttaaggccctgcactgaaaatgcaagctcaggcgccggtggtcgttgtgacccaacctggagtcggtcccg

SEQ ID NO: 33014 - DNA, 174 bp, synthetic construct
  source 1..174: mol_type = other DNA
atcagcccaaaggtaggctcaggctccgacggtggccggcgggggtcacgaggcttcgtagtggaggaacgggtttggcgtgtgggacgcagctgcctctgtactggggagtcacggagtggccgggctccagggacatggcggcggcctctgcggtgtcggtgctgctggtgg

SEQ ID NO: 33015 - DNA, 174 bp, synthetic construct
  source 1..174: mol_type = other DNA
atccggaggcagcctgcaggaagccgtagcgccggtacgtgcccctctcctgtctggaggcgggtgtagaagtccgaccgcggaagccagactgctgtccagtcggcgagcgcgtaccattcagcatcggctccgcccgagtcccaccttcctcaggctctgattggctgacac

SEQ ID NO: 33016 - DNA, 174 bp, synthetic construct
  source 1..174: mol_type = other DNA
caacagaagccaagaaggaagccgtctatcttgtggcgatcatgtataagctggcctcctgctgtttgcttttcataggattcttaaatcctctcttatctcttcctctccttgactccagggaaatatcctttcaactctcagcacctcatgaagacgcgcgcttaactccgg

SEQ ID NO: 33017 - DNA, 174 bp, synthetic construct
  source 1..174: mol_type = other DNA
tggctgacacattcctggagcacatgtgccgcctggacattgattcaccacccatcacagcccggaacactggcatcatctgtaccattggcccagcttcccgatcagtggagctgaagaagggagccactctcaaaatcacgctggataacgcctacatggaaaagtgtgacg

SEQ ID NO: 33018 - DNA, 174 bp, synthetic construct
  source 1..174: mol_type = other DNA
gacatttacatcctgcccagcgacaactctggacaagtcagtcccccagagtctccaactgtgaccacttcctggcagtctgagagcttacctgtgtcactgtcagctagccagagttggcacacagaaagcctgccagtgtcactaggccctgagtcctggcagcagattgca

SEQ ID NO: 33019 - DNA, 174 bp, synthetic construct
  source 1..174: mol_type = other DNA
cctctgacttgacccaatgaaagaagcatatggcacttgtgaagataaatgttactcctccctttttaattggaacttctgcttaggacctgtgtatgacgtttcacctgtgatctgttctttcggtagccactgactttgagttacaggaaggtctccgaagatttgtgtcaa

SEQ ID NO: 33020 - DNA, 174 bp, synthetic construct
  source 1..174: mol_type = other DNA
cttccctgaggaggacgaccccaccaactggctgcgttgctactactacgaagacaccatcagcaccatcaagtctgtggcctgggagggaggggcctgtccagccttcctgccatccctacgaccactgcccctcacatcaccttctcatgggtccctctcccactccaaagc

SEQ ID NO: 33021 - DNA, 174 bp, synthetic construct
  source 1..174: mol_type = other DNA
atttatgatttcaacatggatacatatttcagttctttctttttctcactatctgaaaatacatttccctccctctcttccccccaatatctccctttttttctctcttcctctatcttccaaaccccactttctccctcctccttttcctgtgttctcttaagcagatagcac

SEQ ID NO: 33022 - DNA, 174 bp, synthetic construct
  source 1..174: mol_type = other DNA
cccttccggctggccccgctcagtcacccgcagcaggcgtgcagtttcccggctctccgcgcggccggggaaggtcagcgccgtaatggcgttcttggcgtcgggaccctacctgacccatcagcaaaaggtgttgcggctttataagcgggcgctacgccacctcgagtcgtg

SEQ ID NO: 33023 - DNA, 174 bp, synthetic construct
  source 1..174: mol_type = other DNA
atacaaatttgcctttggcacaacagataccactaagttctacccagttctccgcacaatcattagctcaggcaattggaagccaaattgaagatgccaggcgtgcagcggagccctccttagttggcttacctcagactatcagtggtgacagtgggggaatgtcagcagttt

SEQ ID NO: 33024 - DNA, 174 bp, synthetic construct
  source 1..174: mol_type = other DNA
tccgtcctccaggatctggggagaaagagccccatcccttctctctctgccaccatttcggacaccccgcagggactcgttttgggattcgcactgacttcaaggaaggacgcgaacccttctctgaccccagctcgggcggccacctgtctttgccgcggtgacccttctctc

SEQ ID NO: 33025 - DNA, 174 bp, synthetic construct
  source 1..174: mol_type = other DNA
gtttacttcccctgccagcattggggtgctctctaagcaacagtaggcggagagtggtctggcgtattaaaaacaaaggatcgtcaagtgggccttcccaggcattgctttgacttagtacatgtagaggatgtggcagttctctccgtccctgccactgctggtttctttgtt

SEQ ID NO: 33026 - DNA, 174 bp, synthetic construct
  source 1..174: mol_type = other DNA
tattttaagcccagtcttccctgggccacctttagcagatcctcgtgcgcccccgccccctggccgtgaaactcagcctctatccagcagcgacgacaagtaaagtggcccgccggtttctgagccttctgccctgcggggacacggtctgcaccctgcccgcggccacggacc

SEQ ID NO: 33027 - DNA, 174 bp, synthetic construct
  source 1..174: mol_type = other DNA
ccagcggaagtaattctttcgactgccccggaacccaccggagcaggcagctgggggtgggggggcggccctgggataggggctgtggcagtacgcggggacccggctgcggtggctgcgggactgacgaatggagaggagaaaacctatggtggctgtgaaggacctgatgcc

SEQ ID NO: 33028 - DNA, 174 bp, synthetic construct
  source 1..174: mol_type = other DNA
atggggaaggtgaaggtcggagtcaacggatttggtcgtattgggcgcctggtcaccagggctgcttttaactctggtaaagtggatattgttgccatcaatgaccccttcattgacctcaactacatggtttacatgttccaatatgattccacccatggcaaattccatggc

SEQ ID NO: 33029 - DNA, 174 bp, synthetic construct; identical to SEQ ID NO: 32975
  source 1..174: mol_type = other DNA

SEQ ID NO: 33030 - DNA, 174 bp, synthetic construct
  source 1..174: mol_type = other DNA
atttctgggaagcagtcgatattatctgtacgcctagaacagtgccctctgcagctgaataacccttttaacgagtattccaaatttgatggcaagggtcatgtaggtacaacagcaaccaagaagatcgatgtctacctccctctgcactcgagccaggacagactgctgcca

SEQ ID NO: 33031 - DNA, 174 bp, synthetic construct
  source 1..174: mol_type = other DNA
ctctggtgatacagaagaaaagacagtctccattttcaaacagtccctcctgggagaacacagacaggcagaggattacaacacaaggcagcaagcactgggagacgaaagttttggcatctgttccctggctgtgccaagatgggcgattggagcttcctgggaaatttcctg

SEQ ID NO: 33032 - DNA, 174 bp, synthetic construct
  source 1..174: mol_type = other DNA
gtctactatgtctgaactgtggtttcttgtttatccttttttccttagttggactgtaatgtatggtctgtcaacctgtgaatctttaaagtatgattcaggtattgttgtattctttactgtgtaataaaaaagttgaaaaaaatctggatcctctgtctccctcgtccccgg

SEQ ID NO: 33033 - DNA, 174 bp, synthetic construct
  source 1..174: mol_type = other DNA
tttcgtgaccttgtccagtagaaggctatttaattttcacaactgcttgaattttgacatacaagatgaagcaagatgcctcaagaaatgctgcctacactgtggattgtgaagattatgtgcatgtggtagaatttaatccctttgagaatggggattcaggaaacctaattg

SEQ ID NO: 33034 - DNA, 174 bp, synthetic construct
  source 1..174: mol_type = other DNA
tgtctgcaccagccggcctccagcctggctggaccctgctgcctgtgtggcccggagccagaggcccccacactcccagctgctcttctacagatgccatcaacgagcaggactctgggtggctccactgtctaagggctctgcgagtgacccggcgggcgagctccgtgctgc

SEQ ID NO: 33035 - DNA, 174 bp, synthetic construct
  source 1..174: mol_type = other DNA
cttacgtagtaattacatttccttgaaaaaactatagtgaatagaaatccctagccatttcattttttatgtttttaatgaagatctttaaaataccataggtggtaatcgtggaaaatttgaaaaatctcatgtcagtgtattaagatggtggagaagtttttttctccatta

SEQ ID NO: 33036 - DNA, 174 bp, synthetic construct
  source 1..174: mol_type = other DNA
attcatgaaaatccactactccagacagacggctttggaatccaccagctacatccagctccctgaggcagagttgagaatggagagaatgttacctctcctggctctggggctcttggcggctgggttctgccctgctgtcctctgccaccctaacagcccacttgacgagga

SEQ ID NO: 33037 - DNA, 174 bp, synthetic construct
  source 1..174: mol_type = other DNA
gagcttccagggatatttgaggcaccatccctgccattgccgggcactcgcggcgctgctaacggcctggtcacatgctctccggagagctacgggagggcgctgggtaacctctatccgagccgcggccgcgaggaggagggaaaaggcgagcaaaaaggaagagtgggagga

SEQ ID NO: 33038 - DNA, 174 bp, synthetic construct
  source 1..174: mol_type = other DNA
gccccctcccctgactatcaaagcagcggccggctgttggggtccaccacgccttccacctgccccactgcttcttcgcttctctcttggaaagtccagtctctcctcggcttgcaatggaccccaactgctcctgcgccgctggtgtctcctgcacctgcgctggttcctgca

SEQ ID NO: 33039 - DNA, 174 bp, synthetic construct
  source 1..174: mol_type = other DNA
agtcgcatagtggtttttccgctcgcgtcgctgtgtgaaagttggctcgccgctctttgcacgccctccctggaggccgacccgagacgccaagctggagagaccgtgcctccccgaggccggccgccccgcgagcacagcctccgcccccgttgcactgccgggctgggcaat

SEQ ID NO: 33040 - DNA, 174 bp, synthetic construct
  source 1..174: mol_type = other DNA
ggtggcgggaagaggaggcgcgagaatggaggtggaggccgtctgtggtggcgcgggcgaggtggaggcccaggactctgaccctgcccctgccttcagcaaggcccccggcagcgccggccactacgaactgccgtgggttgaaaaatataggccagtaaagctgaatgaaat

SEQ ID NO: 33041 - DNA, 174 bp, synthetic construct
  source 1..174: mol_type = other DNA
tatttccctctactgagtaaaccctatctgtgattcccccaaacatctggcatggctcccttttgtccttcctgtgccctgcaaatattagcaaagaagcttcatgccaggttaggaaggcagcattccatgaccagaaacagggacaaagaaatccccccttcagaacagagg

SEQ ID NO: 33042 - DNA, 174 bp, synthetic construct
  source 1..174: mol_type = other DNA
tgttacttaagaatgctttccaggtggaaagttccttaagtttgaggcttcaaattccatacagcacattaaaatcccattcatgagtttgaaatactgctctgttgtcttggaaataccaatcagattgttggctgaagtgatgtggataaagaagggatcttagaaaaacta

SEQ ID NO: 33043 - DNA, 174 bp, synthetic construct
  source 1..174: mol_type = other DNA
acgaagttccggaaatggaattaccgagtcagatgagaaacacaagtcatcaatgaattaacaagcaacacattgtcacatccagctgttgaagagtggttaactcagcttgatctccgaagactcttctgcaccccaccccgcccccaactgctttccaaagagaaacagaaa

SEQ ID NO: 33044 - RNA, 40 nt, synthetic construct
  source 1..40: mol_type = other RNA
actcactatttgttttcgcgcccagttgcaaaaagtgtcg

SEQ ID NO: 33045 - DNA, 742 bp, synthetic construct
  source 1..742: mol_type = other DNA
ttaaaacagctctggggttgtacccaccccagaggcccacgtggcggctagtactccggtattgcggtacccttgtacgcctgttttatactcccttcccgtaacttagacgcacaaaaccaagttcaatagaagggggtacaaaccagtaccaccacgaacaagcacttctgtttccccggtgatgtcgtatagactgcttgcgtggttgaaagcgacggatccgttatccgcttatgtacttcgagaagcccagtaccacctcggaatcttcgatgcgttgcgctcagcactcaaccccagagtgtagcttaggctgatgagtctggacatccctcaccggtgacggtggtccaggctgcgttggcggcctacctatggctaacgccatgggacgctagttgtgaacaaggtgtgaagagcctattgagctacataagaatcctccggcccctgaatgcggctaatcccaacctcggagcaggtggtcacaaaccagtgattggcctgtcgtaacgcgcaagtccgtggcggaaccgactactttgggtgtccgtgtttccttttattttattgtggctgcttatggtgacaatcacagattgttatcataaagcgaattggattggccatccggtgaaagtgagactcattatctatctgtttgctggatccgctccattgagtgtgtttactctaagtacaatttcaacagttatttcaatcagacaattgtatcata

SEQ ID NO: 33046 - DNA, 747 bp, synthetic construct
  source 1..747: mol_type = other DNA
ttaaaacagctctggggttgttcccaccccagaggcccacgtggcggccagtacactggtatcgcggtacctttgtacgcctgttttatactcccttcccccgtaacttagaagcacaacgtccaagttcaatagaagggggtacaaaccagtaccaccacgaacaagcacttctgttcccccggtgaggctgtataggctgtttccacggctaaaagcggctgatccgttatccgctcatgtacttcgagaagcctagtatcaccttggaatcttcgatgcgttgcgctcaacactcaaccccagagtgtagcttaggtcgatgagtctggacgttcctcaccggcgacggtggtccaggctgcgttggcggcctacctgtggcccaaagccacaggacgctagttgtgaacaaggtgtgaagagcctattgagctacctgagagtcctccggcccctgaatgcggctaatcctaaccacggagcaggcagtggcaatccagcgaccagcctgtcgtaacgcgcaagttcgtggcggaaccgactactttgggtgtccgtgtttccttttatttttacaatggctgcttatggtgacaattattgatagttatcataaagcaaattggattggccatccggtgagaatttgattattaaattactctcttgttgggattgctcctttgaaatcctgtgcactcacacctattggaattacctcattgttgagatattattaccact

SEQ ID NO: 33047 - DNA, 747 bp, synthetic construct
  source 1..747: mol_type = other DNA
ttaaaacagctctggggttgctcccaccccagaggcccacgtggcggccagtactctggtattgcggtacctttgtacgcctgttttatactccctccccccgtgcaactttagaagaaatccacaaagttcaatagagggggtgcaaaccagcaccaccacgaacaagcacttctgtttccccggtgatgtcgtataagctgtacccacggctgaaggcgacggatccgttatccgcttgagtacttcgagaagcctagtattaccttggaatcttcgacgcgttgcgctcagcactctaccccgagtgtagcttaggtcgatgagtctgggcacgccccaccggcgacggtggcccaggctgcgttggcggcctacccatggctatcaccatgggacgctagttgtgaacaaggtgtgaagagcctattgagctacccaagagtcctccggcccctgaatgcggctaatcctaaccacggagcaagtgtcctcaacccaggggatggcttgtcgtaacgcgaaagtctgtggcggaaccgactactttgggtgtccgtgtttccttttatttttatgtatggctgcttatggtgacaatcaaaggttgttaccataaagcaatttggattggccatccggtgagaatcaaacatattatctacctgtttgttgggttttcttcttttacttgaacaatacctctaataataactgctatattgtcaataagacattatcatcaca

SEQ ID NO: 33048 - DNA, 626 bp, synthetic construct
  source 1..626: mol_type = other DNA
ttaaaactgggtgtgggttgttcccacccacaccacccaatgggtgttgtactctgttattccggtaactttgtacgccagtttttccctcccctccccatccttttacgtaacttagaagttttaaatacaagaccaatagtaggcaactctccaggttgtctaaggtcaagcacttctgtttccccggttgatgttgatatgctccaacagggcaaaaacaacagataccgttatccgcaaagtgcctacacagagcttagtaggattctgaaagatctttggttggtcgttcagctgcatacccagcagtagaccttgcagatgaggctggacattccccactggtaacagtggtccagcctgcgtggctgcctgcgcacctctcatgaggtgtgaagccaaagatcggacagggtgtgaagagccgcgtgtgctcactttgagtcctccggcccctgaatgcggctaaccttaaacctgcagccatggctcataagccaatgagtttatggtcgtaacgagtaattgcgggatgggaccgactactttgggtgtccgtgtttcactttttcctttattaattgcttatggtgacaatatatatattgatatatattggcatc

SEQ ID NO: 33049 - DNA, 610 bp, synthetic construct
  source 1..610: mol_type = other DNA
ttaaaactggatccaggttgttcccacctggatttcccacagggagtggtactctgttattacggtaactttgtacgccagttttatctcccttcccccatgtaacttagaagtttttcacaaagaccaatagccggtaatcagccagattactgaaggtcaagcacttctgtttccccggtcaatgttgatatgctccaacagggcaaaaacaactgcgatcgttaaccgcaaagcgcctacgcaaagcttagtagcatctttgaaatcgtttggctggtcgatccgccatttcccctggtagacctggcagatgaggctagaaataccccactggcgacagtgttctagcctgcgtggctgcctgcacaccctatgggtgtgaagccaaacaatggacaaggtgtgaagagccccgtgtgctcgctttgagtcctccggcccctgaatgtggctaaccttaaccctgcagctagagcacgtaacccaatgtgtatctagtcgtaatgagcaattgcgggatgggaccaactactttgggtgtccgtgtttcactttttcctttatatttgcttatggtgacaatatatacaatatatatattggcacc

SEQ ID NO: 33050 - DNA, 626 bp, synthetic construct
  source 1..626: mol_type = other DNA
ttaaaacagcggatgggtaccccaccatccgacccactgggtgtagtactctggtacttcgtacctttgtacgcctgttcttcccattgtacccttcctgaacttccaacccaagtaacgttagaagctcaacatttagtacaacaggaagcaccacatccagtggtgtttagtacaagcacttctgtttccccggagcgaggtataggctgtacccactgccaaaaacctttaaccgttatccgccaaccaactacgtaaaagctagtagtattatgtttttaactaggcgttcgatcaggtggatttcccctccactagtttggtcgatgaggctaggaattccccacgggtgaccgtgtcctagcctgcgtggcggccaacccagcttatgctgggacgcctttttatagacatggtgtgaagactcgcatgtgcttggttgtgattcctccggcccctgaatgcggctaaccttaaccctggagccttgtgtcacaaaccagtgatgataaggtcgtaatgagcaattccgggacgggaccgactactttgggtgtccgtgtttcttatttttcttattattgtcttatggtcacagcatatatataacatatactgtgatc

SEQ ID NO: 33051 - DNA, 711 bp, synthetic construct
  source 1..711: mol_type = other DNA
ttaaaacagctctggggttgttcccaccccagaggcccacgtggcggccagtactctggtattgcggtacctttgtacgcctgttttatatcccctccccaagtaactttagaagcaattcacaaagttcaatagagggggtacaaaccagtaccaccatgaacaagcacttctgtttccccggtgaagctgtatagactgttcccacggtcgaaaatggcagatccgttatccgctcacgtacttcgagaagcctagtatcatcttggaatcttcgacgcgttgcgctcagcactctaccccgagtgtagcttaggccgatgagtctgggcataccccaccggcgacggtggcccaggctgcgttggcggcctacccatggctaatgtcatgggacgctagttgtgaacaaggtgtgaagagcctattgagctacttgagagtcctccggcccctgaatgcggctaatcctaaccatggagcaagtgcccacaagccagtgggtggcttgtcgtaatgcgcaagtctatggcggaaccgactactttgggtgtccgtgtttccttttattcttattatggctgcttatggtgacaacctaagattgttgtcatatagcttttggattggccatccggtgatctttgagattaatataccttccttattacttcatagtactcatttattcattacactactgtagttaca

SEQ ID NO: 33052 - DNA, 745 bp, synthetic construct
  source 1..745: mol_type = other DNA
ttaaaacagcctgtgggttgttcccacccacagggcccactgggcgctagcacactgattctacgggatccttgtgcgcctgttttataatccttcccccaagtagcaacttagaagctttgtacaatcacgaccagtagtgggcgtggcgcgccagtcacgtcttggtcaagcacttctgtatccccggactgagtatcaatagactgctcacgcggttgaaggagaaaacgttcgttacccggctaactacttcgagaaacccagtagcaccgtgaaagttgcggagtgtttcgctcagcacttcccccgtgtagatcaggtcgatgagtcactgtaaaccccacgggcgaccgtgacagtggctgcgttggcggcctgcccatggggtaacccatgggacgctctaatacagacacggtgtgaagagtctattgagctagttagtagtcctccggcccctgaatgcggctaatcctaactgcggagcgcgcaccctcaacccagggggcggcgtgtcgtaatgggtaactctgcagcggaaccgactactttgggtgtccgtgtttccttttattccttattggctgcttatggtgacaattgaaaagttgttaccatatagctattggattggccatccggtgtctaatagagctattgtttacttatttattggatacgtccctcttaatctcaaagtcattcaaactcttgattatatattgctccttaactgtaagaa

SEQ ID NO: 33053 - DNA, 742 bp, synthetic construct
  source 1..742: mol_type = other DNA
ttaaaacagcctgtgggttgatcccacccacagggcccactgggcgctagcacactggtattacggtacctttgtgcgcctgttttatctacccttgcccaatgcaacatagaagcttagtccaaaaggtcaataggcagcccagtgcaccaactgggtccagaccaagcacttctgttaccccggaccaagtatcagtaggctgctcacgcggtgaaggagaaaacgttcgttacccggccaactacttcgagaaacctagtagcaccatgaaggttgcgcagtgtttcgctccgcacagccccagtgtagatcaggtcgatgagccaccgcattccccacggggtgaccgtggcgggtggctgcgttggcggcctgcccatggggtaacccatgggacgcttcaatactgacatggtgtgaagagtctattgagctagttggtagtcctccggcccctgaatgcggctaatcctaactgcggagcgtgcgcttgcaacccagtgagtagcacgtcgtaatgggtaactctgcagcggaaccgactactttgggtgtccgtgtttcctttattccttgtctggctgcttatggtgacaattgagagattgttgccatatagctattggattggccatccggtatctaacagggcgatcatttacctgtttgttggtttcatacccttgaatcttgaggtttataataccctcactcttataataaaactcaatacatcaag

SEQ ID NO: 33054 - DNA, 742 bp, synthetic construct
  source 1..742: mol_type = other DNA
ttaaaacagcctgtgggttgatcccacccacagggcccattgggcgctagcactctggtatcacggtacctttgtgcgcctgttttataccccctcccccaactgtaacttagaagtaacacacaccgatcaacagtcagcgtggcacaccagccacgttttgatcaagcacttctgttaccccggactgagtatcaatagactgctcacgcggttgaaggagaaagcgttcgttatccggccaactacttcgaaaaacctagtaacaccgtggaagttgcagagtgtttcgctcagcactaccccagtgtagatcaggtcgatgagtcaccgcattccccacgggcgaccgtggcggtggctgcgttggcggcctgcccatggggaaacccatgggacgctctaatacagacatggtgcgaagagtctattgagctagttggtagtcctccggcccctgaatgcggctaatcctaactgcggagcacacaccctcaagccagagggcagtgtgtcgtaacgggcaactctgcagcggaaccgactactttgggtgtccgtgtttcattttattcctatactggctgcttatggtgacaattgagagattgttaccatatagctattggattggccatccggtgaccaatagagctattatatatctctttgttgggtttataccacttagcttgaaagaggttaaaacattacaattcattgttaagttgaatacagcaaa

SEQ ID NO: 33055 - DNA, 748 bp, synthetic construct
  source 1..748: mol_type = other DNA
ttaaaacagcctgtgggttgcacccactcacagggcccacgtggcgctagcactctggttctacggaacctttgtgcgcctgttttacgccccttcccccaatttgcaacttagaagcaatacacaacactggtcaacagtaggcatggcgcaccagccatgtcttgatcaagcacttctgtttccccggaccgagtatcaatagactgctcacgcggttgaaggagaaagcgtccgttatccggctaactacttcgagaaacttagtaacaccattgaagctgcagagtgtttcgctcggcacttcccccgtgtagatcaggtcgatgagtcactgcaatccccacgggtgaccgtggcagtggctgcgctggcggcctgcctatggggtaacccataggacgctctaatgcggacatggtgcgaagagtctattgagctagttagtggtcctccggcccctgaatgcggctaatcctaactgcggagcacatgccttcaatccagagggtagtgtgtcgtaatgggcaactctgcagcggaaccgactactttgggtgtccgtgtttccttttattcttatattggctgcttatggtgacaattacagaattgttaccatatagctattggattggccatccggtgtgcaatagagctattatatacctatttgttggctttgtgccactaaccttaaaatctataaccaccctcgactttatactaaccctcaatacagtcaaac

SEQ ID NO: 33056 - DNA, 748 bp, synthetic construct
  source 1..748: mol_type = other DNA
ttaaaacagcctgtgggttgtacccacccacagggcccactgggcgctagcacactgatttcacggaatccttgtgcgcctgttttacaccccctccccccaactcagtaacttagaagttgtaaacacacgtggccaacagcgggcgtagcgcaccagctatgtcttggtcaagcacttctgtttccccggacagagtatcaataagctgcttgcgcggctgaaggagaaaatgttcgttacccggtcaactacttcgagaaacctagtagcatcatgaatgttgcgaggcgtttcgctcagcacttcccccgtgtagatcaggtcgatgagtcactgcactccccacgggcgaccgtggcagtggctgcgttggcggcctgcccatggggtgacccatgggacgcttcaatacggacatggtgtgaagagtctattgagctagttgataatcctccggcccctgaatgcggctaatcctaactgcggagcacataccctcaacccagggggcggtgtgtcgtaacgggcaactctgcagcggaaccgactactttgggtgtccgtgtttccttttatacttatactggctgcttatggtgacaattgaagaattgttaccatatagctattggattggccatccggtgactaacagagctattatatatttatttgttggatttgttccattaacatacacatctttcagcactttacacctcattttacaatacaatacaagaaa

SEQ ID NO: 33057 - DNA, 742 bp, synthetic construct
  source 1..742: mol_type = other DNA
ttaaaacagcctgtgggttgcacccactcacagggcccactgggcgcaagcactctggtacctcggtacctttgtgcgcctgttttacaccccccccccagtgaaacttagaagcagcaaaccacgatcaatagcgggcataacgctccagttatgtcttgatcaagcacttctgtttccccggactgagtatcaatagactgctcgcgcggttgaaggagaaaacgttcgttatccggctagctacttcgggaaacctagtaacaccatgaaagttgcggagagcttcgttcagcactcccccagtgtagatcaggtcgatgagtcaccgcattccccacgggcgaccgtggcggtggctgcgttggcggcctgcccatggggtaacccatggggcgctctaatacggacatggtgtgaagagtctactgagctagttagtagtcctccggcccctgaatgcggctaatcccaactgcggagcacacgcccacaagccagcgggtagcgtgtcgtaacgggtaactctgcagcggaaccgactactttgggtgtccgtgtttctttttatctttatactggctgcttatggtgacaattaaagaattgttaccatatagctattggattggccatccggtgtgcaacagagcaattgtttacctattcattggtttcgtaccattaaccttgaagtctgtgaccacccttaactacatcttgacccttaacacagctaaac

SEQ ID NO: 33058 - DNA, 743 bp, synthetic construct
  source 1..743: mol_type = other DNA
ttaaaacagcctgtgggttgttcccacccgcagggcccactgggcgctagcacactggtatcccggtacccttgtgcgcctgttttatataccctcccccttatgtaacttagaagtatgattcaaacggtcgacaggcggctcagtgcaccaactgagtcatgaccaagcacttctgttaccccggactgagtatcaataagctgttcacacggctgaaggagaaaacgttcgttacccggccaattacttcgagaaacctagtaccaccatgaaggttgcgcagtgtttcgctccacacaaccccagtgtagatcaggtcgatgagtcaccgcattccccacgggcgaccgtggcggtggctgcgttggcggcctgcccatggggcaacccatgggacgcttcaatactgacatggtgtgaagagtctattgagctaattggtagtcctccggcccctgaatgcggctaatcccaactgtggagcagatactcacaaaccagtgagcggtctgtcgtaacgggcaactccgcagcggaaccgactactttgggtgtccgtgtttctttttattcttacattggctgcttatggtgacaattgacaaattgttaccatatagctattggattggccatccggtgacaaacagagctattgtttacttgtttgttggtttcataccattaaattacaaggtcttagaaactctcaactttattttgacactcaatacagcaaa

SEQ ID NO: 33059 - DNA, 611 bp, synthetic construct
  source 1..611: mol_type = other DNA
ttaaaactggatctgggttgttcccactcagatctcccacgtggagtagtacactattattacggtaatcttgtacgccagttttataatccccttacccaagtaacttagaagataaacacaaagaccaataggagatgatcatccagatcatcataggtcaagcacttctgtttccccggtcaaggttgatatgctctaacagggcaaaaacagctgagatcgttatccgcaaagcgcctacgcaaagcctagtaactatctggaagttgcttggttggtcgctccgccatatcccatggtagacctggcagatgaggctagaaattccccactggtgacagtgttctagcctgcgtggctgcctgcacaccctctgggtgtgaaaccaagtaatggacagggtgtgaagagccccgtgtgctcgctttgagtcctccggcccctgaatgtggctaaccttaaccctgcagctagggcacacaatccagtgtgtatctagtcgtaatgagcaattgcgggatgggaccaactactttgggtgtccgtgtttcttgtttttcttttatgtttgcttatggtgacaatatatagtaatatatrttggcatc

SEQ ID NO: 33060 - DNA, 614 bp, synthetic construct
  source 1..614: mol_type = other DNA
ttaaaactgggtccaggttgttcccacctggatctcctattgggagttgtactctattattccggtaattttgtacgccagttttatctccccttccccaattgcaacttagaagtttatcaatatgaccaataggcggtagttagccaaactaccagaggtcaagcacttctgtttccccggtcaaagttgatatgctccaacagggcaaaaacaactgagatcgttatccgcaaagtgcctacgcaaagcctagtaacacctttgaagatttatggttggtcgttccgctatttcccatagtagacctggcagatgaggctagaaattccccactggcgacagtgttctagcctgcgtggctgcctgcgcaccccttgggtgcgaagccatacattggacaaggtgtgaagagccccgtgtgctcactttgagtcctccggcccctgaatgtggctaaccttaaccctgcagctagtgcatgtaatccaacatgttgctagtcgtaatgagcaattgcgggacgggaccaactactttgggtgtccgtgtttcactttttccttttaatattgcttatggtgacaatatatataaacatatatattgacacc

SEQ ID NO: 33061 - DNA, 544 bp, synthetic construct
  source 1..544: mol_type = other DNA
ttgtttgatgccagttttatctccccccccaattgcaacttagaagatgtacacaaagaccaataggcagtggtcacccagaccactgaaggtcaagcacttctgtctccccggtcaaagttgatatgctccaacagggcaaaaacaacttagatcgttatccgcaaagtgcctacgcaaagcttagtaccatctttgagagcctatggttggtcgctccactgaaccccacagtagacctggcagatgaggctagaagacccccactggcgacagtgttctagcctgcgtggctgcctgcacacccttacgggtgtgaagccatatgtttgacaaggtgcgaagagccccgtgtgctcactttgagtcctccggcccctgaatgtggctaaccttaaccctgcagctagtgcacacaagccagtgtgttgctagtcgtaatgagcaattgcgggatgggaccaactactttgggtgtccgtgtttcactttttacctttattttgcttatggtgacaatatatatagtatatatattggcacc

SEQ ID NO: 33062 - DNA, 618 bp, synthetic construct
  source 1..618: mol_type = other DNA
ttaaaactgggagtgggttgttcccactcactccacccatgcggtgttgtactctgttattacggtaactttgtacgccagtttttcccacccttccccataatgtaacttagaagtttgtacaatatgaccaataggtgacaatcatccagactgtcaaaggtcaagcacttctgtttccccggtcaatgaggatatgctttacccaaggcaaaaaccttagagatcgttatccccacactgcctacacagagcccagtaccatttttgatataattgggttggtcgctccctgcaaacccagcagtagacctggcagatgaggctggacattccccactggcgacagtggtccagcctgcgtggctgcctgctcacccttcttgggtgagaagcctaattattgacaaggtgtgaagagccgcgtgtgctcagtgtgcttcctccggcccctgaatgtggctaaccttaaccctgcagccgttgcccataatccaatgggtttgcggtcgtaatgcgtaagtgcgggatgggaccaactactttgggtgtccgtgtttcctgtttttcttttgattgcattttatggtgacaatttatagtgtatagattgtcatc

SEQ ID NO: 33063 - DNA, 611 bp, synthetic construct
  source 1..611: mol_type = other DNA
ttaaaactgaatccagattgttcccatctggatttcctacatggagttgtactctattattccggtaattttgtacgccagttttatcaccccttcccccgtaacttagaagtttgaaacaaaagaccaataggaggtaactatccaagttactataggtcaagcacttctgtttccccggtcaaagttgatatgctccaccagggcaaaaacaattgagatcgttatccgcaaagtgcctacgcaaagcctagtagtatcttgaaaagcatgtggttggttgctccgctgtaccccacagtaaacctggcagatgaggctagaagttccccactggtgacagtgttctagcctgcgtggctgcctgcgcactctttgagtgcgaagccatatgtttgacaaggtgtgaagagccccgtgtgctcactttgagtcctccggcccctgaatgtggctaaccttaaccctgcagctagtgcatgcaatccagcatgtggctagtcgtaatgagcaattgcgggatgggaccaactactttgggtgtccgtgtttcacttttttccttttataattgcttatggtgacaatatatagtgatatatattgacacc

SEQ ID NO: 33064 - DNA, 625 bp, synthetic construct
  source 1..625: mol_type = other DNA
ttaaaacagcggatgggtttcccaccatccgacccactgggtgtagtgctctggtattttgtacctttgcacgcctgtttcccatttgtacccttccttaatctccttcccccgtaacgttagaagttttggaattttaaagtacaataggaagcgccacatccagtggtgttgcgtacaaatacttctgtttacccggagcgaggtataggttgtacccacggccaaaagcctttaaccgttatccgccaatcaactacgtaacggctagtatcatcttgcttttgatttggtgttcgatcaggtggtatcccccactagtctggtcgatgaggctaggaattccccacgggcgaccgtgtcctagcctgcgtggcggccagcccagcttttgctgggacgccttttcaaagacatggtgtgaagacctgcatgtgcttggttgtgagtcctccggcccctgaatgcggctaaccttaaccctggagcccagcagcataatccaatgttgtttgggtcgtaatgagcaattccgggacgggaccgactactttgggtgtccgtgtttccttttattcttacattgtcttatggtcacagcatatatattatatatactgtgatc

SEQ ID NO: 33065 - DNA, 618 bp, synthetic construct
  source 1..618: mol_type = other DNA
tttaaacagcggatgggttccccaccatccgacccactgggtgtagtactctggtattttgtacctttgtacgcctgtttctcccctacctcccaacctaaacaatcctggtaacttagaagacttaaatcatcgtacaataggtgctgtcacatccagtgacggctagtacaagcacttctgtttccccggagcggagtataaatggccaccgctgtcaaaagctcttaaccgttatccgccaattaactacgcaacggctagtaacatcttgttatttttagggcgttcgatcaggtgagtaaacccctcactagtctggtcgatgaggctgagaattccccacgggcgaccgtgtctcagcctgcgtggcggccagcccagctaatgctgggacgccttaattgtgacatggtgtgaagacccacgtgtgcttaattgtgagtcctccggcccctgaatgcggctaacctaaaccctggagccttgagacacaatccagtgttggcaaggtcgtaatgagtaattccgggacgggaccgactactttgggtgtccgtgtttccttttattttcaaattgttcttatggtcacaatataagtaatatattgtgatc

SEQ ID NO: 33066 - DNA, 632 bp, synthetic construct
  source 1..632: mol_type = other DNA
ttaaaacagcgggtgggtatcccaccacccgacccactgggtgttgtacactggtattttgtacctttgtatgcctgtttgcacctccccaccccttccaattacccttacccgaattrtattatgcggtaacattagaagaagtgaacacagtgcaataggacgtatcacatccagtgatataaagcacaagcaattcttgttccccggagctggatatagactgctaacgtggttgaaggtccttaaccgttatccgccaaccaactacgagacggctagtaatatcatgtttgtctttgagcgttcgatcaggtgaattccccattcactagtttggtcgatgaggctgagaactccccacaggtgactgtgtctcagcctgcgtggcggccaacccagccacggctgggacgcccactgatagacatggtgtgaagacccaattgtgcttggttgtgactcctccggcccctgaatgcggctaacctcaaccccggagccttgtagtgtaagccaacacatacaaggtcgtaatgggcaactctgggacgggaccgactactttgggtgtccgtgtttcctttatttttatcttttgtgtcttatggttacaagtattgattgtaacc

SEQ ID NO: 33067 - DNA, 630 bp, synthetic construct
  source 1..630: mol_type = other DNA
tttaaacagcggatgggtatcccaccatccgacccactgggtgtagtactctggtattttgtacctttgtacgcctgttgttcctaatgtacccaccctaaaacttcctacccaagtaacgttagaagtttcatcaacaagtacaataggaagcatcacatccagtggtgttttgtacaagcacttctgtttccccggagcgaggtataggctgtacccactgccgaaagcctttaaccgttatccgccaaccaactacgtaaaagctagtatcatcatgttttaaaataggcgttcgatcaggtggatcccccctccactagtttggtcgatgaggctaggaactccccacgggtgaccgtgtcctagcctgcgtggcggccaacccagcttctgctgggacgcctttttatggacatggtgtgaagactcgcatgtgcttggttgtgactcctccggcccctgaatgcggctaaccttaaccccggagccctgtgttgcaatccagtaacattagggtcgtaatgagcaatttcgggacgggaccgactactttgggtgtccgtgtttctcatttttcttattattgtcttatggtcacagcatatatataacgtatatactgtgatc

SEQ ID NO: 33068 - DNA, 627 bp, synthetic construct
  source 1..627: mol_type = other DNA
ttaaaacagcggatgggtatcccaccatccggcccactgggtgtagtactctggtacattgtacctttgtacgcctgttttccccctcttgtacccgcccttcaagctccttgcccaagtaacgttagaagtttgaacattggtacaataggaagcatcacatccagtggtgtactgtacaaacacttctgttgccccggagcgaggtatagatggtccccaccgtcaaaagcctttaaccgttatccgccaatcaactacgtaatggctagtagcaccttggatttaagttggcgttcgatcaggtggtaacccccactagtttggtcgatgaggctaggaattccccacgggtgaccgtgtcctagcctgcgtggcggccaacccagcatccgctgggacgccaatttaatgacatggtgtgaagacctgcatgtgcttgattgtgagtcctccggcccctgaatgcggctaaccctaaccccggagccttgcagcacaatccagtgttgttaaggtcgtaatgagcaattctgggatgggaccgactactttgggtgtccgtgtttcttatttttcttgaatttttcttatggtcacagcatatatacattatatactgtgatc

SEQ ID NO: 33069 - DNA, 612 bp, synthetic construct
  source 1..612: mol_type = other DNA
ttaaagctggatcatggttgttcccaccatgattacccacgcggtgcagtggtcttgtattacggtacatttccataccagttttatacaccccaccccgaaactcatagaagtttgtacacaatgaccaataggtggtggccatccaggtcgctaatggtcaagcacttctgtttccccggcacccttgtatacgcttcacccgaggcgaaaaatgaggttgtcgttatccgcaaagtgcctacgaaaagcctagtaacactttgaaaacccatggttggtcgctcagctgtttacccaacagtagacctggcagatgaggctagacattccccaccagcgatggtggtctagcctgcgtggctgcctgcacaccctgccgggtgtgaagccagaaagtggacaaggtgtgaagagcctattgtgctcactttgagtcctccggcccctgaatgtggctaaccctaaccccgtagctgttgcatgtaacccaacatgtatgcagtcgtaatgggcaactatgggatgggaccaactactttgggtgtccgtgtttcctgttttactttttcattgcttatggtgacaattgtatctgatacacttgttacc

SEQ ID NO: 33070 - DNA, 618 bp, synthetic construct
  source 1..618: mol_type = other DNA
ttaaaactggatacaggttgttcccacctgtatcacccaagtggtgtggtgctcttgtatttcggtacgtttgcacgccagtttgctaccccttcccttttacgtaacttagaagtttacacaaagaccaataggcggtggtaaatccataccactaacggtcaaatacttctgtttccccggcatgcgaggaataggctccaaaagggctgaagccactagtgtcgttatccgcattggtactacgcaaagcctagtattaccttgaaaatttcttggctggtcgctccaccagataccccactggtagacctggcagatgaggcaggacttaccccactggcgacagtggtcctgcctgcgtggctgcctgcacaccccttacggggtgtgaagcccagaaacagacaaggtgtgaagagccccgtgtgctactagtgagtcctccggcccctgaatgcggctaatcttaccccacagctgttgcacgcaaaccagcgtgtatgcagtcgtaatgagcaattgtgggatggaaccgactactttgggtgtccgtgtttctttttattcctattatttgcttatggtgacaatattgatattatcagtgttgtcatc

SEQ ID NO: 33071 - DNA, 607 bp, synthetic construct
  source 1..607: mol_type = other DNA
ttaaaacagctgtgtggttgttcccaccaccaggcacactgtgcgttgtacactgggattccggtcactttgtacgcctgtttgctatcccccccaacttatgtaatttagaagatgtacacaacgcccattaggatgcggccaaaccaggtccgcttagggcaagcacttctgtttccccgggtgtgtgaatagactctaacagggttgaagctgtagcactcgttatccgcgcaactactacgcgaatgttagtagcatcctgtgttgcatttgggatttcgctccgcagaaaaccccatctgtagattagggcaatgaggctacacataccccactggcgacagtggtgtagcctgcgtggtgccctacccaggccttcttggcctgggattccacttacaagacagggtgtgaaggcactagtgtgctagttgtgagtcctccggcccctgaatgcggctaatcttaaccccgtagcccccgcaagtaaaccaacttgtaggtggtcgtaatgagtaattacgggatggaaccgactactttgggtgtccgtgtttccttttattctttatatttgcatcctatggttacaacataagtaatc

SEQ ID NO: 33072 - DNA, 741 bp, synthetic construct
  source 1..741: mol_type = other DNA
ttaaaacagcctgtgggttgttcccacccacaggcccattgggcgctagcactctggtatcacggtacctttgtgcgcctgttttacatcccctccccaaattgtaatttagaagtttcacacaccgatcattagcaagcgtggcacaccagccatgttttgatcaagcacttctgttaccccggactgagtatcaatagaccgctaacgcggttgaaggagaaaacgttcgttacccggccaactacttcgaaaaacctagtaacaccatggaagttgcggagtgtttcgctcagcactaccccagtgtagatcaggtcgatgagtcaccgcgttccccacgggcgaccgtggcggtggctgcgttggcggcctgcctacggggaaacccgtaggacgctctaatacagacatggtgcgaagagtctattgagctagttggtaatcctccggcccctgaatgcggctaatcctaactgcggagcacataccctcaaaccagggggcagtgtgtcgtaacgggcaactctgcagcggaaccgactactttgggtgtccgtgtttcattttattcctatactggctgcttatggtgacaattgacaggttgttaccatatagttattggattggccatccggtgactaacagagcaattatatatctctttgttgggtttataccacttagcttgaaagaggttaaaacactacatctcatcattaaactaaatacaacaaa

SEQ ID NO: 33073 - DNA, 742 bp, synthetic construct
  source 1..742: mol_type = other DNA
ttaaaacagcctgtgggttgttcccacccgcagggcccactgggcgccagcactctggtatcacggtacctttgtgcgcctgttttaaaaccctctccccaatttgaaacttagaagcaatacacctcgatcaatagtaggcatgacacgccagccatgtcttgatcaagcacttctgtttccccggactgagtatcaataaactgcttgcgcggtcgaaggagaaaacgtccgttacccgactaactacttcgagaaacccagtaacaccatggaaattgcggagtgtttcactcagcacattcccagtgtagatcaggtcgatgagtcaccgcattccccacgggtgaccgtggcggtggctgcgctggcggcctgcccatggggcaacccatgggacgcttcaatatggacatggtgtgaagagtctattgagctagttagtagtcctccggcccctgaatgcggctaatcctaactgcggagcacgtgcctccattccagggggtggcgtgtcgtaacgggcaactctgcagcggaaccgactactttgggtgtccgtgtttcttttaattttatactggctgcttatggtgacaattgaaagattgttgccatatagctattggattggccatccggtatccaacagagcaattgtgtacctttttgttggatttgtaccacttaccagaacaagttttcatacactgtgttacattattagactaaacacagaaaa

SEQ ID NO: 33074 - DNA, 743 bp, synthetic construct
  source 1..743: mol_type = other DNA
ttaaaacagcctgtgggttgttcccacccacagggcccactgggcgttagcacactggtatcacggtacctttgtgcgcctgttttatactcccccccctaaggaaactttagaagcaaagcaattgtgatcaatagtgggtatggcacaccagtcatatcttgatcaagcacttctgttcccccggacttagtaccaatagactgctcaagcggttgaaggggaaaacgttcgttatccggccaactacttcgagaaacctagtagcaccatgaaagttgcggagtgtttcgctcagcacttcccccgtgtagatcaggctgatgagtcaccgtattccccacgggcgaccgtgacggtggctgcgttggcggcctgcccatggggtaacccatgggacgctctaaaacagacacggtgcgaagagtctattgagctagttggtagtcctccggcccctgaatgcggccaatcctaactgcggagcacatactcccaatccagggagcagtgtgtcgtaatgggtaactctgcagcggaaccgactactttgggtgtccgtgtttccttttattctcacattgactgcttatggtgacaattgaaagattgttaccatatagctattggattggtcatccggtgagcaatagagctattgtttatcaatttgttggatttgtaccactcaacttttctgttttgagaacactcaactacatcttactgctaaacacatcaaa

SEQ ID NO: 33075 - DNA, 751 bp, synthetic construct
  source 1..751: mol_type = other DNA
ttaaaacagcctgtgggttgtacccacccacagggcccactgggcgctagcacactggtatcacggtacctttgtgcgcctgttttatacccccttcccgcaaccgcaaatttagaagcaaagctaacccgatcgatagcggatgcgcatgccagccgcattttgatcaagtacttctgtttccccggaccgagtatcaatagactgctcacgcggttgaaggagaaaacgtccgttacccgaccaactacttcgagaaacctagtaacatcatgaatgttgcagggcgtttcgatcagcacgaccctggtgtagatcaggctgatgagtcaccgcattccccacgggtgaccgtggcggtggctgcgttggcggcctgcctatggggtgacccataggacgctctaatacggacatggtgcgaagagtctattgagctagttggtagtcctccggcccctgaatgcggttaatcctaactgcggacgacatacccctaatccaaggggcagtgtgtcgtaacgggcaactctgcagcggaaccgactactttgggtgtccgtgtttccttttatttttatactggctgcttatggtgacaatctcagagttgttaccatatagctattggattggccatccggtgagcaacagagctgtcatttatcagtttgttggctttatacctctaaatcacacggttttttttttttggaacgcttgtattcatcttaaccctcaataaggcaaa

SEQ ID NO: 33076 - DNA, 743 bp, synthetic construct
  source 1..743: mol_type = other DNA
ttaaaacagcctgtgggttgtacccacccacagggcccactgggcgctagcactctggtattacggtacccttgtgcgcctgttttatataccccgccccaagcaaacgctagatgtaacgcacttatgatcaatagcaggcgtggcactccagccacgttatgatcaagcacttctgtctccccggaccgagtatcaatagactgctcacgcggtcgaaggagaaaacgttcgttacccgaccagctacttcgagaaacctagtaactccatggaggttgcagagtgtttcgttcagcacttcccccgtgtagatcaggctgatgagtcaccgcgttcctcacgggcgaccgtggcggtggctgcgttggcggcctgcctatgggtatacccataggacgctctaatactgacatggtgcgaagagtctattgagctagttggtagtcctccggcccctgaatgcggctaatcctaactgcggagcacatacccccaacccagggggcagtgtgtcgtaacgggtaactctgcagcggaaccgactactttgggtgtccgtgtttccttttattcttacattggctgcttatggtgacaattgagagattgttaccatatagctattggattggccatccagtgactaacagagctattatttacctttttgttggcttcgtatcacttggtttaaaagaggttagtactttatattgcattatattactaaacacgagaaa

SEQ ID NO: 33077 - DNA, 744 bp, synthetic construct
  source 1..744: mol_type = other DNA
ttaaaacagctctggggttgtacccaccccagaggcccacgtggcggctagtactccggtattacggtacccttgtacgcctgttttatactccctccctcgtaacttagaagcacaaaaccaagttcaatagaagggggtgcaaaccagtaccaccacgaacaagcatttctgtttccccggtgatgttgtatagactgcccgcgcggttgaaagcaacggatccgttacccgctcaagtacttcgagaagcctagtattaccttggaatcttcgatgcgttgcgttcagcactcgaccctggagtgtagcttaggctgatgagtctggacgtccctcaccggtgacggtggtccaggctgcgttggcggcctacctatggctaacgccataggacgctagttgtgaacaaggtgtgaagagcctattgagctacttgagagtcctccggcccctgaatgcggctaatcctaaccatggagcaggcggtcacagaccagtgactagcttgtcgtaatgcgcaagtctatggcggaaccgactactttgggtgtccgtgtttccttttatttttattatggctgcttatggtgacaatcattgattgttatcataaagcgaattggattggccatccggtgaaagcgagacttactatttacttacttgttggacttaccacacttaatacatttattctaggtgtcacttgtatagcaattagaatcaaacagttgcatcata

SEQ ID NO: 33078 - DNA, 714 bp, synthetic construct
  source 1..714: mol_type = other DNA
ttaaaacagcctgtgggttgttcccaccccagaggcccacgtggcggccagtactctggtatcacggtacctttgtacgcctgttttatatccccttcccccgcaacttagaagaaaacaaatcaagttcactaggagggggtacaaaccagtaccaccacgaacaagcacttctgtttccccggtgatgtcgtatagactgtaaccacggttgaaaacgattgatccgttatccgctcttgtacttcgaaaagcccagtatcaccttggaatcttcgatgcgttgcgctcagcactcaaccccagagtgtagcttaggtcgatgagtctggacactcctcaccggcgacggtggtccaggctgcgttggcggcctacctgtggtccaaagccacaggacgctagttgtgaacaaggtgtgaagagcctattgagctacaagagaatcctccggcccctgaatgcggctaatcctaaccacggagcaagggtacacaaaccagtgtatatcttgtcgtaacgcgcaagtctgtggcggaaccgactactttgggtgtccgtgtttccttttgtttttatcatggctgcttatggtgacaatctaagattgttatcatatagctgttggattggccatccggtaatttattgagatttgagcatttgcttgtttcttcaacaatttcacctattcattgcatttcagcagtcaaa

SEQ ID NO: 33079 - DNA, 653 bp, synthetic construct
  source 1..653: mol_type = other DNA
gagtgttcccacccaacaggcccactgggtgttgtactctggtattacggtacctttgtacgcctattttatttcccccccctttttgaaacttagaagttaataataaacacgctcactaggtgcactacatccagtagtgtaatgagcaagcacttctgtctyccccgggagggatatatggtacgctgtgcaaacggcggaaattaatcctaccgttaaccgcccacctactccgagaagcctagtacctaattggatttatcaatggagttgcgctcagcaggtgaccctgacctgccagctccggctgatggacctgggctttccccacaggcgactgtggcccaggtcgcgtggcggccggcccacccccctgggtgggacgccttgataatgacaaggtgggaagagcctattgggctagctggtttcctccggcctcctgaatgcggctaaccttaaccccagagcatatggtagcaacccagctactagtatgtcataatgcgtaagtctgggatgggaccgactactttggagagtccgtgtttctattgtttctttaatcaatcttatggtgacaatttatagtgccctgagtattgattggttgttgcttttgacaattattgagacatcacatagacata

SEQ ID NO: 33080 - DNA, 722 bp, synthetic construct
  source 1..722: mol_type = other DNA
ttaaaatagcctgtgggttgctcccacccacagggcccaagtggcgtagtacttggtattccggtacctttgtacacctatttacaaaccctaccccttgtaaccttagaagcaattatttaaccgctcactagggggtgtgctatccaagcacatcaagagcaagcacttctgtctccccgggaggggctaatggtacgctgtgcccacggcggaaatgagccctaccgttaaccggcagtctacttcgggaagcccagtaactacattgaaactttgaggcgttacactcagcacataaccccaatgtgtagttctggtcgatgagccttggcatcccccacaggcgactgtggccaaggctgcgttggcggccagcctgcggaccaaaagtccgtaggacgcctaattgtggacatggtgtgaagagcctactgagctagactgtagtcctccggcccctgaatgcggctaatcctaaccctggagcatccgcgtgcaacccagtacgtagggtgtcgtaatgcgtaagtctgggatggaaccgactactttgggtgtccgtgtttcttgtttttcatactgggtcgcttatggttacaactaattgttgtaatcattggcagtgcgcgctgaccacgcgattattgatatttccatttgttggatactccaatagtgtcaactcatatacacaacttttaccactgatcaagataaaa

SEQ ID NO: 33081 - DNA, 666 bp, synthetic construct
  source 1..666: mol_type = other DNA
ttaaaatagctgctgggttgttcccatccagcaggcccactgggcgtgatactctggtattgcggtacctttgtatgcctattttacctcccttccccctgaaacttagaagaaagaaacaaacacgctcactaggtacactgcatccagcagtgtaatgagcaagcacttctgtttccccggaagggatatatggtacgctgtgcaaacggcggaaattaatcctaccgttaaccgcccatctactccgagaagcctagtacctaattgaacttatcaatggagttgcgctcagcaggtgaccctgacctgccagctccggctgatggacctgggcatcccccacaggcgactgtggcccaggtcgcgtggcggccggcccactcttttgagtgggacgccttgataatgacaaggtgggaagagcctattgggctagctggtttcctccggcctcctgaatgcggctaaccctaaccccggagcatatggtggcaacccagccactggtatgtcgtaacgcgtaagtctgggatgggaccgactactttggagagtccgtgtttccattattttctttattgaatcttatggtgacaaattgggagttactcgggtgacgattgattattacttctgaaaacgtagagatatagaatcaacaca

SEQ ID NO: 33082 - DNA, 743 bp, synthetic construct
  source 1..743: mol_type = other DNA
ttaaaacagcctgtgggttgttcccacccacagggcccactgggcgctagcacactggtatcacggtacctttgtgcgcctgtttgacttaccctccccaaacgcaacttagaagcacaacttaaatggtcaataggcggctcagtatgccaactgagtctcgatcaagcacttctgttaccccggactgagtaccaataggctgctcacgcggctgaaggggaaaccgttcgttacccgactaactacttcgagaaacctagtaccaccatgaaagttgcgcagcgtttcgctccgcacaaccccagtgtagatcaggtcgatgagtcaccgcaaaccccacgggcgaccgtggcggtggctgcgctggcggcctgcccatggggcaactcatgggacgcttcaatactgacatggtgcgaagagtctattgagctagttggtagtcctccggcccctgaatgcggctaatcctaactgcggagcagatacccacgcaccagtgggcagtctgtcgtaatgggcaactctgcagcggaaccgactactttgggtgtccgtgtttccttttgttcttatactggctacttatggtgacaattgagagattgtaaccatattgctattggattggccacccggcgacgaatagaacagttgcttacctgtttgttagtctcgtatcactgaactacaaatccttaaacaccctttaatttcgtcataacgctcaatacgttaaa

SEQ ID NO: 33083 - DNA, 626 bp, synthetic construct
  source 1..626: mol_type = other DNA
ttaaaacagcggatgggtatcccaccatccgacccactgggtgtagtactctggtactttgtacctttgtacgcctgttcttcccattgtacccttcctaaacttccaacccaagtaacgttagaagctcaactttcagtacaataggaagcaccacatccagtggtgtttagtacaagcacttctgtttccccggagcgaggtataggctgtacccactgccaaaagcctttaaccgttatccgccaaccaactacgtaaaagctagtaacatcatgtttgtaaatgggtgttcgatcaggtggatttcccctccactagtttggtcgatgaggctaggaattccccacgggtgaccgtgtcctagcctgcgtggcggccaacccagcgtatgctgggacgcctttttatagacatggtgcgaagactcgcatgtgcttggttgtgagtcctccggcccctgaatgcggctaaccctaaccctggagccttgagtcacaatccagtgatggcaaggtcgtaatgagcaattccgggatgggaccgactactttgggtgtccgtgtttctcatttttcttattattgtcttatggtcacagcatatatagtatatatactgtgatc

SEQ ID NO: 33084 - DNA, 631 bp, synthetic construct
  source 1..631: mol_type = other DNA
ttaaaacagcgggtgggtatcccaccacccgacccactgggtgtggtacactggtactttgtacctttgtatgcctgtttgcttccactcccctttacctaatattcttccccaagtatattttgcggtaacgttagaagaagcaaagttagtgcaataggatgtatcacaaccagtggtataaagcacaagcaattcttgttccccggagctggatatagactgctaacgtggtcaaaagtccttaaccgttatccgccagctaactgcgagaagactagtaacaccatgtttgtttttagacgttcgatcaggtgaataccccattcactagtttggtcgatgaggctgagaataccccacaggtaactgtgtctcagcctgcgtggcggccaacccgactcatgtcgggacgcctactaatagacatggtgtgaagatcctattgcgcttagttgtgagtcctccggcccctgaatgcggctaaccctaaccccggagccttgtggtgtaaaccaacatttgcaaggtcgtaatgagtaattctgggatgggaccgactactttgggtgtccgtgtttcctttatttttattgtgtgtgtcttatggttacaaatacaatttgtaatc

SEQ ID NO: 33085 - DNA, 627 bp, synthetic construct
  source 1..627: mol_type = other DNA
ttaatacagcggatgggtatcccaccatccgacccactgggtgtagtactctggtattatgtacctttgtacgcctgttcttcccattgtacccttcccaaatttccaacccaagtaacgttagaagtttgacattaaagtacaataggaggcaccacatccagtggtgttttgtacaagcacttctgtttccccggagcgaggtataggctgtacccactgccaaaaacctttaaccgttacccgccagccaactacgtaaaagctagtaacatcttgtttgtaacttggcgttcgatcaggtggattccccctccactagtttggtcgatgaggctaggaactccccacgggtgaccgtgtcctagcctgcgtggcggccaacccagctcttgctgggacgcccttttatagacatggtgtgaagactcgcatgtgcttggttgtgattcctccggcccctgaatgcggctaaccctaaccctggagccttgtgttacaaaccagtaatattaaggtcgtaatgagcaattccgggacgggaccgactactttgggtgtccgtgtttctcatttttcttattattgtcttatggtcacagcatatttgttaaatatactgtgatc

SEQ ID NO: 33086 - DNA, 584 bp, synthetic construct
  source 1..584: mol_type = other DNA
tactctggtattatgtacctttgtacgcctgtttcttccctacaaccccttcctaaaactcccacccatgaaacgttagaagcttgacatttaagtacaataggtggcaccacatccagtggtgtctacgtacaagcacttctgtttccccggagcgaggtataggctgtacccactgccaaaagcctttaaccgttatccgccaaccaactacgtaacagctagtatcatcttgttcttcactggacgttcgatcaggtggattccccctccactagtttggtcgatgaggctaggagctccccacgggtgaccgtgtcctagcctgcgtggcggccaacccagctcatgctgggacgcccttttaaggacatggtgtgaagactcgcatgtgcttggttgtgagtcctccggcccctgaatgcggctaaccttaaccctggagccttatgccacgaaccagtggttgtaaggtcgtaacgagcaattccgggatgggaccgactactttgggtgtccgtgtttcctatttttctttatattgtcttatggtcacagcatatatataagtatatactgtgatc

SEQ ID NO: 33087 - DNA, 627 bp, synthetic construct
  source 1..627: mol_type = other DNA
ttaaaacagcggatgggtatcccaccatccgacccacagggtgtagtgctctggtattttgtacctttgcacgcctgtttccccattgtacccctccttaaatttcctccccaagtaacgttagaagtttaaggaaacaaatgtacaataggaagcatcacatccagtggtgttatgtacaagcacttctgtttccccggagcgaggtataagtggtacccaccgccgaaagcctttaaccgttatccgccaatcaactacgtaatggctagtattaccatgtttgtgacttggtgttcgatcaggtggttccccccactagtttggtcgatgaggctaggaactccccacgggtgaccgtgtcctagcctgcgtggcggccaacccagcttttgctgggacgcctttttacagacatggtgtgaagacctgcatgtgcttgattgtgagtcctccggcccctgaatgcggctaaccttaaccccggagccttgcaacataatccaatgttgttgaggtcgtaatgagtaattctgggatgggaccgactactttgggtgtccgtgtttccttttattctttatattgtcttatggtcacagcatatatagcatatatactgtgatc

SEQ ID NO: 33088 - DNA, 622 bp, synthetic construct
  source 1..622: mol_type = other DNA
ttaaaacagcggatgggttccctaccatccgacccactgggtgtagtactctggtactctgtacctttgtacgcctgtttatccactacccttttcctaaattttccacccgtgtaaccttagaagcaaacaaattgtacaatagggtgcatcacaaccagtgatgtacagtacaagcacttctgtttccccggagcggggtatagacggtcaccactgtcaaaagcccttaaccgttacccgccaaccaactacgtaacggctagtaacaccatgaatttgtcttgacgttcgatcaggtggtaaccccccactagtttggtcgatgaggctgagaactccccacgggtaaccgtgtctcagcctgcgtggcggccaacccagcttctgctgggacgccaattcattgacatggtgtgaagacctgcatgtgcttggttgtgattcctccggcccctgaatgcggctaaccctaaccccggagccacgcggcataatccaatgtcgtatgggtcgtaatgagtaattctgggatgggaccgactactttgggtgtccgtgtttcctgtttttccaaattattcttatggtcacagcatataaatagatatatactgtgatc

SEQ ID NO: 33089 - DNA, 632 bp, synthetic construct
  source 1..632: mol_type = other DNA
ttaaaacagcgggtgggtatcccaccacccgacccactgggtgtggtacactggtactttgtacctttgtatgcctgtttgcatccccttccctttacctaacatccctccccaagttatattttgcggtaacgttagaagaagtgaacatagtgcaacaggaagtatcaccaccagtgatataacgcacaagcaattcttgttccccggagctggatatagactgctaacgtggttgaaagtccttaaccgttatccgccaatcaactgcgaaaagactagtaacatcatgcacatttctaggtgttcgatcaggtgaaaaccccattcactagtttggtcgatgaggctgagagtaccccacaggcgactgtgtctcagcctgcgtggcggccaacccgacttatgtcgggacgcctattaatagacatggtgtgaagatcctattgcgcttagctgtgagtcctccggcccctgaatgcggctaaccttaaccccggagtcttgtgatgtaagccaacatttgcaaggtcgtaatgagtaattctgggatgggaccgactactttgggtgtccgtgtttcctttattcttatcatttgtgtttcatggttacaagcattgtttgtaatc

SEQ ID NO: 33090 - DNA, 622 bp, synthetic construct
  source 1..622: mol_type = other DNA
ttaaaacagcggatgggtatcccaccatccgacccactgggtgtagtactctggtactctgtacctttgtacgcctgtttctcctcaaccctcccctacccgttatatatctcagtaacttagaagaattcattaccgcacaatagggaccgttgtaaccagcaacggtcagtgcaagcacttctgtttccccggagcggagtatagacggccactgctgtcaaaagctcttaaccgttacccgccagtatactacacaacagctagtaacatcttgttgttcttagggcgttcgatcaggtgagtttaccccctcactagtctggtcgatgaggctgagaaatccccacgggtgaccgtgtctcagcctgcgtggcggccagcccagcttatgctgggacgccttaagtatgacatggtgtgaagactcgcgtgtgcttagctgtgagtcctccggcccctgaatgcggctaacctaaaccccggagccttgaggcacaatccagtgcccgcgaggtcgtaacgagaaattctgggacgggaccgactactttgggtgtccgtgtttccttttatctttttgatgttcttatggttacaatatataaagtatattgtaatc

SEQ ID NO: 33091 - DNA, 624 bp, synthetic construct
  source 1..624: mol_type = other DNA
ttaaaacagcggatgggtatcccaccatccgacccactgggtgtagtactctggtattatgtacctttgtacgcctgtttctcccccccattacccctccccacatatcccagtaacttagaagaattaaattatcgcacaataggagctattacaaccagtaatagttagtgcaagtacttctgtttccccggagcggagtatagatggccaccgctgtcaaaagctcttaaccgttatccgccagtatactacgtaacggctagtaacatcttgttgtgcttaaggtgttcgatcaggtgaagagacacccccttcactagtctggtcgatgaggctgagaaatccccacgggcgaccgtgtctcagcctgcgtggcggccagcccagcttatgctgggacgccttaagtatgacatggtgtgaagacccgcatgtgcttaactgtgagtcctccggcccctgaatgcggctaaccttaaccctggagccttggggtacaatccagtgctaacaaggtcgtaacgagcaattccgggacgggaccgactactttgggtgtccgtgtttccttttatttcattattgttcttatggttacaatatatagagtatattgtaatc

SEQ ID NO: 33092 - DNA, 620 bp, synthetic construct
  source 1..620: mol_type = other DNA
ttaaaacagcggatgggtatcccaccatccgacccactgggtgtagtactctggtactttgtacctttgtacgcctgtttctccctcccttcccaacctaaacaatccttgtaacttagaaggtttcgattatcgcacaatagggactattgcaaccagcaatagtcagtgcaagcacttctgtttccccggagcggagtgtagatggccaccgctgtcaaaagctcttaaccgttatccgccagtatactacgcaacggctagtagtgccttgttgcttttatggcgttcgatcaggcgagatttaccccctcgctagtctggtcgatgaggctgagaattccccacgggcgaccgtgtctcagcctgcgtggcggccagcccagcctttgctgggacgccttgattgcgacatggtgtgaagacccgcgtgtgcttaactgtgagtcctccggcccctgaatgcggctaacctaaaccctggagccttgaaacacaacccagtgttcgcaaggtcgtaacgagcaattccgggacgggaccgactactttgggtgtccgtgtttcctttattctttcaattgttcttatggtcacaatataagtgttatattgtgatc

SEQ ID NO: 33093 - DNA, 622 bp, synthetic construct
  source 1..622: mol_type = other DNA
ttaaaacagctgatgggttccccaccatccgacccaatgggtgtagtactctggtattctgtacctttgtacgcctgtttctccccacccccccgtcctaaataatcccagtaacttagaagatttgaattatcgtacaataggtgctgtcacatccagtgatggctagtacaagcacttctgtttccccggagcggagtatagatggccaccgctgtcaaaagctcttaaccgttatccgccaattaactacgcaacggttagtaacatcttgtcatttttgaggcgttcgatcaggtgagtacacccctcactagtctggtcgatgaggctgagaattccccacgggcgaccgtgtctcagcctgcgtggcggccagcccagcttatgctgggacgccttaattgtgacatggtgcgaagacccacgtgtgcttaattgtgagtcctccggcccccgaatgcggctaacctaaaccccggagccttgagacacaatccagtgttagcaaggtcgtaacgagcaattctgggacgggaccgactactttgggtgtccgtgtttcctgttattctcaaattgttcttatggtcacaatataagtaatatatatattgtgatc

SEQ ID NO: 33094 - DNA, 630 bp, synthetic construct
  source 1..630: mol_type = other DNA
ttaaaacagcggatgggttctcccaccatccgacccactgggtgtagtactctggtatgatgtacctttgtacgcctgtttattcccaaacccccacccgttattcgcccaacccctgtaacgttagaagtttggaacttaattgtacaatagggagcaccatatccaatggtgtaacgtacaagcacttctgtttccccggagcgaggtataggtggtacccactgccgaaagcctttaaccgtcatccgccaatcaactacgtaacagctagtaacatcttgttgttgattggacgttcgatcaggtggttcaccccccactagtttggtcgatgaggctgggaatcccccacgggtgaccgtgtcccagcctgcgtggcggccaacccagcttatgctgggacgccctttcaatgacatggtgtgaagactcgcatgtgcttgattgtgagtccgccggcccctgaatgcggctaaccctaaccctggagccttgcaccacaatccagtggtgtctgggtcgtaatgagtaattctgggatgggaccgactactttgggtgtccgtgtttctcatttttcttttaattgtcttatggtcacagcatatagtattatatactgtgatc

SEQ ID NO: 33095 - DNA, 624 bp, synthetic construct
  source 1..624: mol_type = other DNA
ttaaaacagcggacgggtatcccaccatccggctcactgagcgtagtactctggtattgtgtacctttgtacgcctgttttccccaaatcccctaccctttatatctcctaccccgtaacgtaagaagttttcaaacagtacaataggaagcaccacatccagtggtgttatgtacaagcacttctgtttccccggagcgaggtataggtggtcaccaccgccaaaagcctttaaccgttacccgccaaccaactacgtaatggctagtaacatcattgatttagattggcgttcgatcaggtggtatccccccactagtttggtcgatgaggctaggaataccccacgggtgaccgtgtcctagcctgcgtggcggccaacccagcatacgctgggacgccagtttactgacatggtgcgaagacttgcatgtgcttggttgagagtcctccggcccctgaatgcggctaaccttaaccccggagcctcgcagcataatccaatgttgtagaggtcgtaacgagtaattctgggatgggaccgactactttgggtgtccgtgtttcctgtttttctttaaaatgtcttatggtcacagcatatatactgtatatactgtgatc

SEQ ID NO: 33096 - DNA, 484 bp, synthetic construct
  source 1..484: mol_type = other DNA
gtacaataggttgcactacatccagtggtgtttcgtacaagcacttctgtttccccggagcggggtatagacggtacccactgtcaaaagcccttaaccgttatccgccaatcaactacgtaatggctagtaacatcatgaaggtgagttgacgttcgatcaggtggtaacccccactagtttggtcgatgaggctaggaatcccccacgggtaaccgtgtcctagcctgcgtggcggccaacccagcgtttgctgggacgccaattcactgacatggtgcgaatacttgcatgtgcttgattgtgattcctccggcccctgaatgcggctaaccttaaccccggagccttgcagcataaaccaatgttgtggaggtcgtaatgagcaattctgggatgggaccgactactttgggtgtccgtgtttcctgtttttctcaaattgtcttatggtcacagcatatatattgtatatactgtgatc

SEQ ID NO: 33097 - DNA, 621 bp, synthetic construct
  source 1..621: mol_type = other DNA
ttaaaacagcggatgggtatcccaccatccggcccactgggcgtagtacactggtattctgtacctttgtacgcctgtttgccgcccctcccccttttattaccacatttgtggtcgctgcaacgttagaagattttaaagtagtgcaataggaagcatcacaaccagtggtgttatgcacaaacacttctgtttccccggagcgaggtatagacggtccccactgtcaaaagcctttaaccgttatccgccaaccaactacgagacagctagtaatgccctgttctcctgcaaggcgttcgatcagacagatttcccctctgttagtctggtcgatgaggctagaagtaccccacaggtaactgtgttctagcctgcgtggcggccagcccagcttctgctgggacgcctttcaagagacatggtgtgaagactcaattgtgcttggttgtgagtcctccggcccctgaatgcggctaaccttaaacccggtaccatgctatgcaaaccagcatagttatggtcgtaatgggcaactctgggatgggaccgactactttgggtgtccgtgtttccatttttactttttgtgtcatttatggttacaattaagttgtaacc

SEQ ID NO: 33098 - DNA, 631 bp, synthetic construct
  source 1..631: mol_type = other DNA
ttaaaacagcggatgggtaccctaccatccgacccactgggtgtagtacactggtacattgtacctttgtacgcctgtttctccctattgtaccttccctcacaatcctaacccctgtaacgttagaagatgtgcaactcgtgcaataggagatactgcaaccagtggtatcaagcacaagaacttctgtttcctcggagcggagtatagatggtccccaccgtcaaaagctcttaaccgttatccgccaatcaactacgtgacgactggtagcatcattttgacactttgacgttcgatcaggtaggcttaccccacctactagtttggccgatgaggctgggagtccctcacaggtaactgtgtcccagcctgcgtggcggccaacccagcaattgctgggacgccaatttgttgacatggtgtgaagatcttaatgtgcttggttgtgagtcctccggcccctgaatgcggctaaccttaaccccggagccttgtgtcacaagccagtgacattaaggtcgtaatgagtaatttcgggatgggaccgactactttgggtgtccgtgtttcctgtttttctttatgattgtcttatggtcacagcatatagtaattatatactgtgatc

SEQ ID NO: 33099 - DNA, 620 bp, synthetic construct
  source 1..620: mol_type = other DNA
ttaaaacagcggatgggtttcccaccatccgacccactgggtgtagtactctggtacattgtacctttgtacgcctgtttctcccctccctcccaacctatacaatcccggcaacttagaagatttgaactattgtacaataggcgctgtcacatccagtggcggctagtacaagcacttctgtttccccggagcggagtatagatggccaccgctgtcaaaagctcttaaccgttatccgccaattaactacgcaacggctagtaatatcatgtaacttttagggtgttcgatcaggtgagtgtacccctcactagtctggtcgatgaggctgagaattccccacgggcgaccgtgtctcagcctgcgtggcggccagcccagcttatgctgggacgccttaattgtgacatggtgtgaagacccacgtgtgcttaattgtgagtcctccggcccctgaatgcggctaacctaaaccctggagccttgaaacacaatccagtgttagcaaggtcgtaatgagtaattccgggacgggaccgactactttgggtgtccgtgtttccttttatttttaagttgttcttatggtcacaatataagtaatatatattgtgatc

SEQ ID NO: 33100 - DNA, 628 bp, synthetic construct
  source 1..628: mol_type = other DNA
ttaaaacagtggatgggtttcctaccatccgacccactgggtgtagtgctctggtatattgtacctttgcacgcctgttttcccattgtacccttccttaaattcctccccatgtaacgttagaagtttaagaacataaatgtacaataggaagcatcacatccagtggtgtatggtacaagcacttctgtttatccggagcgaggtataagcggtacccactgctgaaagcctttaaccgtataccgccaatcaactacgtaacggctagtattaccttgtttgcaatctggcgttcgatcaggtggttccccccactagtttggtcgatgaggctaggagttccccacgggcgaccgtgtcctagcctgcgtggcggccaacccagcatttgctgggacgcctttttgtagacatggtgtgaagacctgcatgtgcttgattgtgagtcctccggcccctgaatgcggctaaccttaaccccggagccttgtgacataatccaatgtcattaaggtcgtaatgagcaattctgggacgggaccgactactttgggtgtccgtgtttctctttattctttacattgtcttatggtcacagcatatataatacatatatactgtgatc

SEQ ID NO: 33101 - DNA, 625 bp, synthetic construct
  source 1..625: mol_type = other DNA
ttaaaacagcggatgggtttcccaccatccgacccactgggtgtagtgctctggtattttgtacctttgcacgcctgtttcccctttgtacccatcctgaatttcctccctctgcaacgttagaagtttgtgaaattaaaagtacaataggaagcatcacatccagtggtgttcagtacaagcactcctgtttccccggagcgaggtataggttgtacccacgaccgaaagcctttaaccgttatccgccaatcaactacataacggctagtatcatcatgtttttgatctggcgttcgatcaggtggtttcccccactagtctggtcgatgaggctaggatttccccacgggcgaccgtgtcctagcctgcgtggcggccagcccagcttatgctgggacgcctttttaaagacatggtgtgaagacctgcatgtgcttgattgtgagtcctccggcccctgaatgcggctaaccttaaccctggagcccgacagcataatccaatgttgtttgggtcgtaatgagcaattccgggatgggaccgactactttgggtgtccgtgtttctttttattcttatattgtcttatggtcacagcatatatagtatatatactgtgatc

SEQ ID NO: 33102 - DNA, 625 bp, synthetic construct
  source 1..625: mol_type = other DNA
ttaaaacagcgggtgggtatcccaccacccgacccactgggtgtagtacactggtattttgtacctttgtatgcctgtttgccatccctccctctcctcttacccttacccttattttgcggtaactttagaagtttgtaaatcacgcgcaatagggtataccacatccagtggtatgaagcacaagcaattcttgttccccggagctggatataaactgctaacgtggttgaaagtccttaaccgttatccgccagttaactgcgagaagactagtaactccatgtttgtttttaagcgttcgatcaggtggataccccattcactagtttggtcgatgaggctgggaatcccccacaggtaactgtgtctcagcctgcgtggcggccaacccagcttttgctgggacgcttactgacagacatggtgtgaagatcctattgcgcttaactgtgagtcctccggcccctgaatgcggctaacctcaaccccggagccttgtggtgtaaaccaacactcgcaaggtcgtaacgagtaattctgggacgggaccgactactttgggtgtccgtgtttcctttatttcttattgattgtctcctatggttacaaatttactgtaatc

SEQ ID NO: 33103 - DNA, 632 bp, synthetic construct
  source 1..632: mol_type = other DNA
ttaaaacagcgggtgggtatcccaccacccgacccactgggtgtggtacactggtactttgtacctttgtatgcctgtttgcatccctttcccctcgcctaacatccttccccaaagtatattttgcggtaacgttagaagaagtgaactcagtgcaacaggaagtatcaccaccagtgatataatgcacaagcaattcttgttccccggagctggatatagactgctaacgtggttgaaagtccttaaccgttatccgccagctaactgcgagaagactagtaacatcatgtacatttctagacgttcgatcaggtgaataccccattcactagtttggtcgatgaggctgagagttccccacaggtgactgtgtctcagcctgcgtggcggccaacccgacttatgtcgggacgcctattaatggacatggtgcgaagatcctattgcgcttagctgtgagtcctccggcccctgaatgcggctaaccttaaccccggagccttgtggtgcaaaccagcatttgcaaggtcgtaatgagcaattctgggatgggaccgactactttgggtgtccgtgtttcctttattcttattatttgtgtttcatggttacaagcatagtttgtaatc

SEQ ID NO: 33104 - DNA, 626 bp, synthetic construct
  source 1..626: mol_type = other DNA
ttaaaacagcggatgggtttcccaccatccgacccactgggtgtagtgctctggtattttgtacccttgcacgcctgtttcccatttgtacccttccttaatttcctacccctgtaacattagaagttttggaattttacggtacaataggaagcgccacatccagtggtgttgtgtacaagcacttctgtttacccggagcgaggtataggttgtacccacggccaaaaaccttcaaccgttatccgccaaccaactacgtaacggctagtatcatcttgtatttgacttggcgttcgatcaggtggtatcccccactagtctggtcgatgaggctaggaattccccacgggcgaccgtgtcctagcctgcgtggcggccagcccagctttagctgggacgccttttcaaagacatggtgtgaagacctgcatgtgcttggttgtgagtcctccggcccctgaatgcggctaaccttaaccccggagcccagtgacataatccaatgttatttgggtcgtaatgagtaattccgggatgggaccgactactttgggtgtccgtgtttccttttattctttatattgtcttatggtcacagcatatatagtatatatactgtgatc

SEQ ID NO: 33105 - DNA, 631 bp, synthetic construct
  source 1..631: mol_type = other DNA
ttaaaacagcggatgggttctcccaccatccgacccactgggtgtagtactctggtattatgtacctttgtacgcctgtttattcccaaaccccctcccgttacatttccaacccctgtaacgttagaagtttggaacttaacagtacaataggaggcaccatatccaatggtgtaatgtacgagcacttctgtttccccggagcgaggtataggtggtacccaccgctgaaagcctttaaccgttatccgccaatcaactacgtaacagctagtagcattttgttgttgactggacgttcgatcaggtggtttacccccccactagtttggtcgatgaggctggaaattccccacgggtgaccgtgttccagcctgcgtggcggccaacccagctcatgctgggacgccctttcaatgacatggtgtgaagactcgcatgtgcttgattgtgaatcctccggcccctgaatgcggctaaccctaaccccggagccttgcatcacaatccagtgatgttagggtcgtaatgagtaattctgggatgggaccgactactttgggtgtccgtgtttctcatttttctttgaattgtcttatggtcacagcatatagtaatatatactgtgatc

SEQ ID NO: 33106 - DNA, 633 bp, synthetic construct
  source 1..633: mol_type = other DNA
ttaaaacagcgggtgggtatcccaccacccgacccactgggtgtggtacactggtactttgtacctttgtatgcctgtttgcatcccttttcccttcacctaacatcctcccccaaagtatattttgcggtaacgttagaagaagtgaactcagtgcaacaggaagtatcaccaccagtgatataacgcacaagcaattcttgttccccggagctggatatagactgctaacgtggtcaaaagtccttaaccgttatccgccagctaactgcgagaagactagtaacatcatgcacatttctagacgttcgatcaggtgaataccccattcactagtttggtcgatgaggctgagagttccccacaggtgactgtgtctcagcctgcgtggcggccaacccgacttatgtcgggacgcctattaatggacatggtgtgaagatcctattgcgcttagctgtgagtcctccggcccctgaatgcggctaaccttaaccccggagccttgtggtgcaaaccagcatttgcaaggtcgtaatgagcaattctgggatgggaccgactactttgggtgtccgtgtttcctttattcttattatttgtgtttcatggttacaagcatagtttgtaatc

SEQ ID NO: 33107 - DNA, 624 bp, synthetic construct
  source 1..624: mol_type = other DNA
ttaaaacagcggatgggtatcccaccatccgacccactgggtgtagtactctggtattatgtacctttgtacgcctgtttctccctccctaccaccccgccccacgtatcccgtaacttagaagaattgaacaatcgcacaataggagctattacaaccagtaatagttggtgcaagcacttctgtttccccggagcggagtatagacggccaccgctgtcaaaagctcttaaccgttacccgccagctaactacgtaacggctagtaacatcttgtcgtgcttagggtgttcgatcaggtgaagaaaaacccccttcactagtctggtcgatgaggctgagaagtccccacgggtaaccgtgtctcagcctgcgtggcggccagcccagcatatgctgggacgccttaagtatgacatggtgtgaagacccgcatgtgcttagctgtgagtcctccggcccctgaatgcggctaacctaaaccctggagccttggagcacaagccagtgcttgcaaggtcgtaatgagcaattccgggacgggaccgactactttgggtgtccgtgtttccttttatctcattattgttcttatggttacaatatatagagtatattgtaatc

SEQ ID NO: 33108 - DNA, 744 bp, synthetic construct
  source 1..744: mol_type = other DNA
ttaaaacagcctgtgggttgtacccacccacagggcccactgggcgctagcacactggtatcacggtacctttgtgcgcctgttttataccccctaccccaactttaaacttagaagcaaagcaaacccgatcaatagcagatgtagcaagccagttgcatcttgatcaagtacttctgtctccccggactgagtatcaatagactgctcacgcggttgaaggagaaaacgttcgttacccgaccaactacttcgagaaacctagtaacaccatgaaagtagcagggtgtttcgatcagcacaaccccagtgtagatcaggctgatgagtcaccgcatcccccacgggcgaccgtggcggtggctgcgctggcggcctgcccatggggcaacccatgggacgctctaatatggacatggtgtgaagagtctattgagctagttggtagtcctccggcccctgaatgcggctaatcctaactgcggagcacataccccaaagccaaggggcagtgtgtcgtaacgggcaactctgcagcggaaccgactactttgggtgtccgtgtttccttttattctcaaactggctgcttatggtgacaatctcagagttgttaccatatagctattggattggccatccggtgagcaacagagcaattgtctaccaatttgttggatttattccactcaatctagcggttttcagaacattgaattatattctaaccctcaacaagacgaa

SEQ ID NO: 33109 - DNA, 744 bp, synthetic construct; identical to SEQ ID NO: 33108
  source 1..744: mol_type = other DNA

SEQ ID NO: 33110 - DNA, 742 bp, synthetic construct
  source 1..742: mol_type = other DNA
ttaaaacagcctgtgggttgttcccactcacagggcccactgggcgctagcacactggtatcacggtacccttgtgcgcctgttttattcaccccccccaaatgtaacttagaagcataacccaaatggtcaatagacagcccagtacaccagctgggtttcggccaagtacttctgttaccccggaccgagtatcaataggctgctcacgcggctgaaggagaaaacgttcgttatccggccaattacttcgagaaacctagtaacaccatgaaagttgcgcagtgtttcgctccgcacaaccccagtgtagatcaggtcgatgagtcaccgcgttccccacgggcgaccgtggcggtggctgcgttggcggcctgcccatggggcaacccatgggacgcttcaatactgacatggtgcgaagagtctattgagctaattggtagtcctccggcccctgaatgcggctaatcctaactgcggagcagatacccacatgccagtgggcggtctgtcgtaacgggcaactccgcagcggaaccgactactttgggtgtccgtgtttccttttattcttaatctggctgcttatggtgacaattgaaagattgttgccatatagctattggattggccatccggtgacaaacagggcgattatttatttgtttgttggttttgttccattaaactatagagttttgaatactctagaatttattataacactcaacacaacaaa

SEQ ID NO: 33111 - DNA, 747 bp, synthetic construct
  source 1..747: mol_type = other DNA
tttaaaacagtcctgtgggttgttacccacccacagggcccactgggcgccagcacactggtatcacggtacctttgtgcgcctgttttatatacccttcccctactaagtaacttagaagcaattaaacaaagaccaacagtaagcacagcgcaccagctgtgtttcggtcaagcacttctgttaccccggactgagtatcaataggctactcacgtggctgaaggagaaaacgttcgttacccgaccaattacttcgagaagcctagtaacaccatggaggttgcgcggcgtttcgctccacacaaccccagtgcagatcaggtcgatgagccaccgcattccccacgggcgaccgtggcggtggctgcgttggcggcctgcccatggggcaacccatgggacgcttcaatactgacatggtgcgaagagtctattgagctaattggtagtcctccggcccctgaatgcggctaatcccaactgcggagcagatacccacgcgccagtgggcagtctgtcgtaatgggcaactctgcagcggaaccgactactttgggtgtccgtgtttcctttattcttatactggctgcttatggtgacaattgagagattgttaccatatagctattggattggccatccggtgacgagcagagctattatttacctatttgttggttttataccattgaactataaagttttaaaaaccttaaacttcatcttagtactcaatacagcaaa

SEQ ID NO: 33112 - DNA, 742 bp, synthetic construct
  source 1..742: mol_type = other DNA
ttaaaacagcctgtgggttgtacccacccacagggcccattgggcgctagcacactggtattccggtacccttgtgcgcctgttttatctacccttccctactgcaacttagaagttaaacagtcacggtcgataggcggttcagtaaaccaactggatcttgaccaagcacttctgttaccccggactgagtatcaataagctgcttacgtggctgaaggagaaaacgttcgttacccggccaattacttcgagaaacctagtaccaccatgaaggttgcgcagcgtttcgctccgcacaaccccagtgtagatcaggtcgatgagtcaccgcactcctcacgggcgaccgtggcggtggctgcgctggcggcctgcccatggggcaacccatgggacgcttcaatactgacatggtgcgaagagtctattgagctaattggtaatcctccggcccctgaatgcggctaatcccaactgcggagcaggtacccacacaccagtgggcagcctgtcgtaacgggcaactctgcagcggaaccgactactttgggtgtccgtgtttccttttattcctatactggctgcttatggtgacaattgaaagattgttaccatatagctattggattggccatccagtgacaaacagagcaattgtctatctatttgtcggttttgtaccaataaatttcaaagtcctaaaaaccctcaatttcatattgttacttaacacaacaag

SEQ ID NO: 33113 - DNA, 741 bp, synthetic construct
  source 1..741: mol_type = other DNA
ttaaaacagcctgtgggttgtacccacccacagggcccattgggcgctagcacactggtatcacggtacccttgtgcgcctgttttatccgcccctccccattgtaacttagaagataactaaacacggtcgttaggtggctcagtacgccaactgagtcttgaccaagcacttctgttaccccggactgagtatcaataggctgctcacgcggctgaaggagaaaacgttcgttatccggccaattacttcgagaaacctagtaccaccatggaggttgcgcagtgtttcgctccgcacaaccccagtgtagatcaggccgatgagtcaccgcattccccacgggcgaccgtggcggtggctgcgctggcggcccgcccatgggtaacccatgggacgcttcaatactgacatggtgtgaagagtctattgagctaattggtagtcctccggcccctgaatgcggctaatcccaactgcggagcagatacccacacaccagtgggcagtctgtcgtaacgggcaactctgcagcggaaccgactactttgggtgtccgtgtttccttttattccaatactggctgcttatggtgacaattgaaagattgttaccatatagctattggattggccatccggtgacaaacagagcgattgtttacctatttgtaggtttcataccattgaattttaaagttttaagaacccttaactttatattagcacttaacacaacaaa

SEQ ID NO: 33114 - DNA, 743 bp, synthetic construct
  source 1..743: mol_type = other DNA
ttaaaacagcctgtgggttgatcccacccacagggcccactgggcgtcagcactctggtatcacggtacctttgtgcgcctgttttatactccctccccccaaccgtaacttagaagcagcactaactgatcaatagccagcgcggcatgccagccacgcttcgatcaagcacttctgttaccccggactgagtatcaatagactgctcacgcggttgaaggagaaaacgttcgtcatccggccaactacttcgagaaacctagtaacaccatggaagttgcggagtgtttcgctcagcactaccccagtgtagatcaggtcgatgagtcaccgcattccccacaggcgactgtggcggtggctgcgttggcggcctgcccatggggaaacccatgggacgctcttatatagacatggtgcgaagagtctattgagctagttggtagtcctccggcccctgaatgcggctaatcctaactgcggagcatacaccctcaaaccagagggcagtgtgtcgtaatgggcaactctgcagcggaaccgactactttgggtgtccgtgtttcactttatttctaaattggctgcttatggtgacaattgagagattgttaccatatagctattggattggccatccggtgaccaatagagctattatatatctctttgttgggttcataccacttagcttgaaagaggttaaaactctgcattacattatactattgaattccgcaaa

SEQ ID NO: 33115 - DNA, 739 bp, synthetic construct
  source 1..739: mol_type = other DNA
ttaaaacagcctgtgggttgtacccacccacagggcccattgggcgcttgcacactggtattccggtacctttgtgcgcctgttttatacatcctacccccgtaacttagaagcaagatcacccgatcaccaggaaatgtggcaaaccagtcacattctgatcaagcacttctgtttccccggactgagtatcaataggctgttcacacggctgaaggagaaaacgttcgttacccggccaactacttcgaaaaacctagtatcaccgtgaacgttgcagagtgtttcgctcagcactttccccgtgtagatcaggtcgatgagtcaccgcattccccacgggcgaccgtggcggtggctgcgttggcggcctgcctgcggggcaacccgtaggacgctctaatacagacacggtgtgaagagtctattgagctagttggtagtcctccggcccctgaatgcggctaatcctaactgcggagcgagcgcttgtaatccaacaggtagctcgtcgtaacgggtaactctgcagcggaaccgactactttgggtgaccgtgtttccttttatttcattactggctgcttatggtgacaatcacagagttgttaccatatagctattggattggccatccggtgtcaaatagagcaattgtgtttctttttgttgggtttgtaccacttgacttgaccagctacaacactctgtgctacattgttagattgaacacagcaaa

SEQ ID NO: 33116 - DNA, 745 bp, synthetic construct
  source 1..745: mol_type = other DNA
ttaaaacagcctgtgggttgcacccacccgcagggcccactgggcgctagtacactggtaccccggtacccttgtacgcctgttttatttctccctcccccaaccagtaacctagaagtaaagcaaacccgatcaatagcaggtgcgacacaccagtcgtatcttgatcaagcacttctgtaaccccgggccgagtatcaatagactgctcacgcggttgagggagaaaacgctcgttatccggctgactacttcgagaaacccagtaacaccatagaagttgcagagtgtttcgctcagcactttccccgtgtagatcaggtcgatgagtcaccgcattccccacgggtgaccgtggcggtggctgcgttggcggcctgcctatggggcaacccatgggacgctctaatacagacatggtgtgaagagtcaattgagctagtcagtattcctccggcccctgaatgcggctaatcctaactgcggagcacgtgcctccaatccagggggtggcgtgtcgtaacgggtaactctgcagcggaaccgactactttgggtgtccgtgtttccttttattcttatcttggctgcttatggtgacaattgaaggattgttaccatatagctattggattggccatccggtgactaacagagcaatcatataccaatttgttggttttataccattgaattacaaagttctaatcacccttaaattcattttaacacttaatacgtcaaa

SEQ ID NO: 33117 - DNA, 742 bp, synthetic construct
  source 1..742: mol_type = other DNA
tttaaaacagcctgtgggttgttcccacccacagggcccactgggcgctagcactctggtatcacggtacccttgtgcgcctgttttatatccccaccccagtggaacattagaagcagcacacctatgatcaatagtgggcgtggcatccagtcacgttatgatcaagcacttctgtgaccccggactgagtatcaatagactgctcacgcggttgaaggagaaaacgttcgttacccggccagttacttcgagaaacccagtaacaccatgaatgttgcagagtgtttcgctcagcacttcccccgtgtagatcaggtcgatgagccactgcattccccacgggcgaccgtggcagtggctgcgttggcggcctgcctatggggtcacccataggacgctctaatactgacatggtgcgaagagtctattgagctaactggtagtcctccggcccctgaatgcggctaatcctaactgtggagcacattcccccaatccagggggcagtgtgtcgtaacgggcaactctgcagcggaaccgactactttgggtgtccgtgtttctttttattctcatattggctgcttatggtgacaattacagaattgttaccatatagctattggattggccatccggtgactaacagagcaattatttatcaattcgttggatttgtcccactcgatttcaaagcagtcaatacactctcatatatcgttacactcaacacaacaaa

SEQ ID NO: 33118 - DNA, 744 bp, synthetic construct
  source 1..744: mol_type = other DNA
ttaaaacagcctgtgggttgttcccacccacagggcccaccgggcgccagcacactggtatcacggtacccttgtgcgcctgttttatccaccccttcccacagtaacttagaagcacaccatgtatacggtcaataggcggctcagtacaccaactgggccacgaccaagcacttctgttaccccggactgagtatcaataagctgctcacgcggctgaaggagaaaacgttcgttacccggccaattacttcgagaaacccagtaccaccatgaaggttgcgcagcgtttcgttccgcacaaccccagtgtagatcaggtcgatgagtcaccgcgttcctcacgggtgaccgtggcggtggctgcgttggcggcctgcccatggggcaacccatgggacgcttcaatactgacatggtgcgaagagtctattgagctaattggtagtcctccggcccctgaatgcggctaatcctaactgcggagcagatacccacaaaccagtgggcagtctgtcgtaacgggcaactctgcagcggaaccgactactttgggtgtccgtgtttccttttatccttacactggctgcttatggtgacaattgagaaattgttaccatatagctattggattggccatccggtgacaaacagagcagttgtttacctatttgttggtttcgtaccgctgaaccttaaagttctaaagaccctcaattttatcttagcacttaacacagcaaa

SEQ ID NO: 33119 - DNA, 742 bp, synthetic construct
  source 1..742: mol_type = other DNA
ttaaaacagcctgtgggttgttcccacccacagggcccaccgggcgctagcacactggtattgcggtacctttgtgcgcctgttttatacacccctccttaatgtaactcagaagtacaacattaccggtcaacagatgactcagtaaaccaactgagcctcgaccaagcacttctgtttccccggaccgagtatcaataggctgctcacgcggctgaaggagaaagtgttcgttacccggccaattacttcgagaagcccagtaccaccatggaggttgcgcggcgtttcgctccgcacatccccagtgtagatcaggctgatgagtcaccgcgttccccacgggtgaccgtggcggtggctgcgctggcggcctgcccatggggtaacccatgggacgcttcaatactgacatggtgtgaagagcctattgagctaattggtagtcctccggcccctgaatgcggctaatcctaactgcggagcagatacccacacaccagcgggcagtctgtcgtaacgggcaactctgcagcggaaccgactactttgggtgtccgtgtttccttttatttttatgctggctgcttatggtgacaattgaggaattgttaccatatagctattggattggccatccagtgtccaacagagcgatcatttacctgttcgttgggttcgtaccactaaaccacaagtcactcagcacacttaattacattataactctcaacacaacaag

SEQ ID NO: 33120 - DNA, 742 bp, synthetic construct
  source 1..742: mol_type = other DNA
ttaaaacagcctgtgggttgtacccacccacagggcccactgggcgctagcacactggtattacggtacccttgtgcgcctgttttatttacccctcccccacgcaacctagaagcatgacttaagcggtcaatagatggctcagtatgccaactgagttatgaccaagcacttctgttaccccggaccgagtatcaataggctgctcacgcggctgaaggagaaagtgttcgttacccggccagttacttcgagaaacctagtatcatcatgaaggttgcgaggcgtttcgctccacacgaccccggtgtagatcaggctgatgagtcaccgcattccccacgggcgaccgtggcggtggctgcgctggcggcctgcccatggggcaacccatgggacgcttcaatattgacatggtgcgaagagtctattgagctaactggtagtcctccggcccctgaatgcggctaatcctaactgcggagcagacacccacatgccagtgggcagtctgtcgtaacgggcaactctgcagcggaaccgactactttgggtgtccgtgtttccttttattcttatattggctgcttatggtgacaattgaaagattgttgccatatagctattggattggccatccagtgactaacagagcaattgtctacctgttcgttggttacgtaccactaaattataaagttttgaacacacttaattttattatagcacttaacaccttaaa

SEQ ID NO: 33121 - DNA, 743 bp, synthetic construct
  source 1..743: mol_type = other DNA
ttaaaacagcctgtgggttgttcccacccacagggcccatagggcgccagcactctggtatcccggtacctttgtgcgcctgttttatccacccttccccaagcgtaacttagaagcccatcatacacggtcaataggtggttcagtatgccaactgagtcttgaccaagcacttctgttaccccggactgagtatcaataagctgctcacgcggctgaaggagaaaacgttcgttatccggccaattacttcgagaaacctagtaacaccatgaaggttgcgcagcgtttcgctccgcacaaccccagtgtagatcaggtcgatgagtcaccgcactccccacgggcgaccgtggcggtggctgcgttggcggcctgcccatggggcaacccatgggacgcttcaatactgacatggtgcgaagagtctattgagataattggtagtcctccggcccctgaatgcggctaatcctaactgcggagcagatacccacatgccagtgggcagtctgtcgtaacgggcaactctgcagcggaaccgactactttgggtgtccgtgtttccttttatttctatactggctgcttatggtgacaattgacagattgttaccatatagctattggattggccatccggtgacgaacagagcaattatttacttatttgttggttttataccattaaatttcaaagttttaaaaaccctcaacttagttttgtcactcaactcagcaaa

SEQ ID NO: 33122 - DNA, 744 bp, synthetic construct
  source 1..744: mol_type = other DNA
ttaaaacagcctgtgggttgatcccacccacagggcccactgggcgctagcacactggtattccggtacttttgtgcgcctgttttatacacccttccccttcatgtaacttagaagtaaaacacaaacggtcaataggtagctcagcaaaccagctgagcctcggccaagcacttctgttaccccggactgagtatcaataagctgttaacacggctgaaggagaaaacgttcgttatccggccaattacttcgagaaacctagtaacaccatgaaggttgcgtagcgtttcgctccacacaaccccagtgtagatcaggtcgatgagtcaccgctctccccacgggtgaccgtggcggtggctgcgttggcggcctgcccatggagcactccatgggacgcttcaatactgacatggtgtgaagagtctattgagctaattggtagtcctccggcccctgaatgcggctaatcctaactgcggagcagacacccacacgccagtgggcagtctgtcgtaatgggcaactctgcagcggaaccgactactttgggtgtccgtgtttccttttattcttacattggctgcttatggtgacaatcaaggaattgttaccatatagctattggattggccatccggtatctaacagagcaattgtttacctcttcaccggttttgtaccattgaattgcaatagtctcaacaccctttgctatatcattaaattgaactcagcaaa

SEQ ID NO: 33123 - DNA, 752 bp, synthetic construct
  source 1..752: mol_type = other DNA
aaagcaggctttaaaacagctctggggttgttcccacccacagggcccactgggcgctagcactctggtatcacggtacctttgtgcgcctgtttttccacccctccccatacgcaacttagaagagagactcaaccggtcaatagacagcctagtacaccaactaggttctgaccaagaacttctgtttccccggaccgagtatcaataggctgcttacgcggctgaaggagaaaacgttcgttacccggccaattacttcgagaaacctagtatcaccatggaagttgcgcagtgtttcgctccgcacaaccccagtgtagatcaggtcgatgagtcaccgcattccccacaggcgactgtggcggtggctgcgttggcggcctgcccgtggggcaacccacgggacgcttcaataccgacatggtgcgaagagtctattgagctaattggtagtcctccggcccctgaatgcggctaatcctaactgtggagcagatacccacgcgccagtgggcagtctgtcgtaatgggcaactccgcagcggaaccgactactttgggtgtccgtgtttccttttatcctcataatggctgcttatggtgacaattgaaagattgttaccatatagctattggattggccatccggtgactaacagagcaattatttatttgtttgttgggtttgtaccattgaactacaaggtccttaatactctaaactacattataagtcttaatacagtgca

SEQ ID NO: 33124 - DNA, 742 bp, synthetic construct
  source 1..742: mol_type = other DNA
ttaaaacagcctgtgggttgttcccacccacagggcccactgggcgccagcacactggtatcacggtacctttgtgcgcctgttttatccacccttccccaatgtaacttagaagtaaaactagaaagatcaatagcaagcacagtatgccaactgtgttatgatcaagcacttctgttaccccggactgagtatcaataagctgctaaagcggctgaaggagaaaacgttcgttacccggccaactacttcgagaaacccagtaccaccatgaaggttgcgcagtgtttcgctccacacaatcccagtgtagatcaggtcgatgagtcaccgcgttccccacgggcgaccgtggcggtggctgcgttggcggcctgcccatgggatgacccatgggacgcttcaatactgacatggtgcgaagagtctattgagctagttggtagtcctccggcccctgaatgcggctaatcctaactgcggagcagatacccacacaccagtgggcagtctgtcgtaacgggtaactctgcagcggaaccgactactttgggtgtccgtgtttctttttatcctcaaattggctgcttatggtgacaattgataagttgttaccatatagctattggattggccatccggtgtctaacagagctattgtttatttatttgttggtttcgtgccactaaattacaaagtttttgaaactctcaacttcattttgacactcaataaagcaaa

SEQ ID NO: 33125 - DNA, 742 bp, synthetic construct
  source 1..742: mol_type = other DNA
ttaaaacagcctgtgggttgttcccacccacagggcccaatgggcgccagcactctggtattacggtacctttgtgcgcctgttttatatcccctcccccaattgtaacttagaagcaacacgcaccgaccaacagtgggcgtggcacaccagccacgtcttggtcaagcacatctgtttccccggactgagtatcaatagactgctcacgcggtcgaaggagaaaacgttcgttatccggccaactacttcgagaagcccagtaacaccatgaatattgcgaagtgtttcgctcagcacactcccagtgtagatcaggtcgatgagtcaccgcattccccacgggcgaccgtggcggtggctgcgttggcggcctgcctatggggcaacccgtaggacgcttcaatatggacatggtgtgaagagtctattgagctagttggtagtcctccggcccctgaatgcggctaatcctaaccgcggagcaggcacccacaaaccagtgggcagcttgtcgtaacgggtaactctgcggcggaaccgactactttgggtgtccgtgtttccttttattcttatactggctgcttatggtgacaattgagagattgttgccatatagctattggattggccatccggtgacaaacagagcaattgtttatctatttgttggttttataccgttaagttttaaagtcctaaaaacccttaacttggtcatactactcaactcagcaaa

SEQ ID NO: 33126 - DNA, 744 bp, synthetic construct
  source 1..744: mol_type = other DNA
ttaaaacagtctgtgggttgttcccacccacagggcccacgtggcgccagcacactggtatctcggtacctttgtgcgcctgttttatccaccctaaaccccgttgtaacttagaagatgagcaacactgatcaatagtgggtgcaacatgccagttgcatcacgatcaagcacttctgtatccccggactgagtatcaataggctgctcacgcggctgaaggagaaaacgttcgttatccggccagttacttcgagaaacctagtaacatcatggaggttgcgcagtgtttcgctccgcacacccccagtgtagatcaggtcgatgagtcaccgcgttccccacgggcgaccgtggcggtggctgcgttggcggcctgcccatgggataacccatgggacgcttcaatactgacatggtgtgaagagtctattgagctaactggtagtcctccggcccctgaatgcggctaatcctaactgtggagcagacacccacatgccagtgggcagtctgtcgtaacgggcaactccgcagcggaaccgactactttgggtgtccgtgtttccttttattcctatattggctgcttatggtgacaattgaaagattgttaccatatagctattggattggccatccggtgtcaaacagagcaatcatttatttgtttgttggttttatacctctgaactttaaagtgctaaagactctcaattttatattatatctcaacaaatcagg

SEQ ID NO: 33127 - DNA, 742 bp, synthetic construct
  source 1..742: mol_type = other DNA
ttaaaacagcctgtgggttgttcccacccacagggcccactgggcgccagcactctggtattacggtacctttgtgcgcctgttttatatccccctccccacttgaaacttagaagtgaaacacactgatcaatagttgacatggcaagccagccatgtcttgatcaagcacctctgtttccccggacctagtatcaatagactgctcgcgcggttgaaagagaaagcgttcgttacccggctaactacttcgagaaacttagtaacaccatggaagttgcggagtgtttcgctcagcacatccccagtgtagatcaggccgatgagtcaccgcattccccacgggcgaccgtggcggtggctgcgttggcggcctgcctgtggggcaacccacaggacgctctaatacaaacatggtgcgaagagtctattgagctagttagtagtcctccggcccctgaatgcggctaatcctaactgcggagcacgtgcttccaatccaggaggtggcgtgtcgtaacgggtaactctgcagcggaaccgactactttgggtgtccgtgtttccttttattcttgcattggctgcttatggtgacaattgagagattgttaccatatagctattggattggccatccggtgacaaacagagcaattatatatctctttgttggatacattccattgaactacaaggagttaaaaaccctcaattatattctgttcttgaattccgcaag

SEQ ID NO: 33128 - DNA, 742 bp, synthetic construct
  source 1..742: mol_type = other DNA
ttaaaacagcctgtgggttgttcccacccacagggcccatggggcgccagcacactggtattgcggtacctttgtgcgcctgttttattcaccctttcccaatgaaacttagaagcttaactcaaccggtcgatagacagcccagtacaccaactgggttttgaccaagtactcctgtttccccggactgagtatcaataagctgctcgcgcggctgaaggagaaaacgttcgttacccggccaattacttcgagaaacctagtaccaccatgaacgttgcgcagtgtttcgctccgcacaaccccagtgtagatcaggtcgatgagtcaccgcaatccccacgggcgaccgtggcggtggctgcgctggcggcctgcccatggggcatcccatgggacgcttcaatactgacatggtgcgaagagtctattgagctaattggtaatcctccggcccctgaatgcggctaatcctaactgcggggcagacacccacacgccagtgggcagtctgtcgtaacgggtaactccgcagcggaaccgactactttgggtgtccgtgtttccttttatctttatattggctgcttatggtgacaattgaaagattgttgccatatagctattggattggccatccggtgtctaatagagcaattatatatctctttgttggcttcatcccgttaaataaagtgagctaccagaccctgtgctatattatcaaattgaacacaataaa

SEQ ID NO: 33129 - DNA, 743 bp, synthetic construct; identical to SEQ ID NO: 33058
  source 1..743: mol_type = other DNA

SEQ ID NO: 33130 - DNA, 742 bp, synthetic construct
  source 1..742: mol_type = other DNA
ttaaaacagcctgtgggttgttcccacccacagggcccactgggcgccagcacactggtatcacggtacccttgtgcgcctgttttataaacccttccccaatgcaacttagaagctcaactttaccggtcaatagacagtccagtacgccaactgggcttcgatcaagcacttctgttaccccggactaagtatcaataggctgctcacgcggctgaaggagaaaacgttcgttacccggccaattacttcgagaaacccagtaacactatggaggttgcgcagtgtttcgttccacacaaccccagtgtagatcaggtcgatgagtcaccgctttccccacgggcgaccgtggcggtggctgcgttggcggcctgcccatggggcaacccatgggacgcttcaatactgacatggtgtgaagagtctattgagctaattggtattcctccggcccctgaatgcggctaatcctaactgcggagcagatactcacgagccagtgggcagtctgtcgtaacgggtaactctgcagcggaaccgactactttgggtgtccgtgtttccttttattcatatattggctgcttatggtgacaattgagagattgttaccatatagctattggattggccatccggtgactaatagagcaattgtttacctatttgttggctttgtgccgttgaactacaaggttttaaaaactattaactacatcctagtacttaacacgttgaa

SEQ ID NO: 33131 - DNA, 658 bp, synthetic construct
  source 1..658: mol_type = other DNA
actctggtattgcggtacctttgtacgcctgttttatatcccttccccatgtaactttagaagcaattcacaaggttcaatagagggggtacaaaccagtaccaccacgaacaagcacttctgtttccccggtgaagctgtatagactgtccccacggtcaaaaacggcagatccgttatccgcttatgtacttcgagaagcctagtatcatcttggaatcttcgatgcgttgcgttcagcactctatcccgagtgtagcttaggtcgatgagtctgggcattccccaccggcgacggtggcccaggctgcgttggcggcctacccatggctaacgccatgggacgctagttgtgaacaaggtgtgaagagcctattgagctacatgagagtcctccggcccctgaatgcggctaatcccaaccacggagcaagtactcacaacccagtgggcagcttgtcgtaacgcgtaagtctgtggcggaaccgactactttgggtgtccgtgtttcctttttatttttgatatggctgcttatggtgacatctaagattgttatcatatagcttttggattggccatccggtgatttttgagactaaaacgcttgtttgccttatcacacaatttagtattttgttatattcatacggtcata

SEQ ID NO: 33132 - DNA, 732 bp, synthetic construct
  source 1..732: mol_type = other DNA
ttaaaacagctctggggttgttcccactcaagggcccacgtggcggctagtactctggtatctcggtacctttgtacgcctgttttaattccctccccaacgtaacttagaagcttttaaaccaaagctcaataggtggagcgcaaaccagcgctcttatgagcaagcacttctgtctccccggtgtggttgtatagactgtccccacggttgaaaacaacttatccgttacccgctatagtacttcgagaaacctagtattgccttcggagtgttgatgcgttgcgctcagcacactaacccgtgtgtagcttgggtcgatgagtctggacgtaccccactggcgacagtggtccaggctgcgttggcggcctactcatggtgaaaaccatgggacgctagacatgaacaaggtgtgaagagtctattgagctgctatagagtcctccggcccctgaatgcggctaatcctaaccatggagcaagtgctcacaaaccagtgagttacttgtcgtaacgcgcaagtccgtggcggaaccgactactttgggtgtccgtgtttcactttttacttttatgactgctaatggtgacaatttaatattgttaccatttggcttgtcgaattgatcacataagatctatagttttgttcactgatttgctttgaaataatctcacctcaaaacctccagtacataacatttaaagagtttaaacttatttataaca

SEQ ID NO: 33133 - DNA, 726 bp, synthetic construct
  source 1..726: mol_type = other DNA
ttaaaacagctctggggttgttcccaccccagaggcccacgtggcggctagtactccggtaccccggtacccttgtacgcctgttttatactccctttcccaagtaactttagaagaaataaactaatgttcaacaggagggggtacaaaccagtaccaccacgaacacacacttctgtttccccggtgaagttgcatagactgtacccacggttgaaagcgatgaatccgttacccgcttaggtacttcgagaagcctagtatcatcttggaatcttcgatgcgttgcgatcagcactctaccccgagtgtagcttgggtcgatgagtctggacaccccacaccggcgacgtggtccaggctgcgttggcggcctacccatggctagcaccatgggacgctagttgtgaacaaggtgcgaagagcctattgagctacctgagagtcctccggcccctgaatgcggctaatcccaaccacggagcaaatgctcacaatccagtgagtggtttgtcgtaatgcgcaagtctgtggcggaaccgactactttgggtgtccgtgtttccttttatttttattatggctgcttatggtgacaatctgagattgttatcatatagctattggattagccatccggtgacatcttgaaattttgccataactttttcacaaatcctacaacattacactacactttctcttgaataattgagacaactcata

SEQ ID NO: 33134 - DNA, 714 bp, synthetic construct; identical to SEQ ID NO: 33078
  source 1..714: mol_type = other DNA

SEQ ID NO: 33135 - DNA, 728 bp, synthetic construct
  source 1..728: mol_type = other DNA
ttcccaccctagaggcccacgtggcggctagtactctggtattacggtacctttgtacgcctgttttatatccctttccccattgtaacttagaagtttcaaagtacagttcaatagacagtagtacaaaccagtactgctacgaacaagcacttctgttgccccggtgtagttgcatagactgtacccacggttgaaagcaactgatccgttatccgctttagtacttcgagaagcctagtagcaccttgggatcttcgatgcgttgcgctcagcactcaaccccagagtgtagcttgggtcgatgagtctggacattcctcaccggcgacggtggtccaggctgcgttggcggcctacctgtggcccaaagccacaggacgctagttgtgaacaaggtgtgaagagcctattgagctactaaagagtcctccggcccctgaatgcggctaatcctaaccacggagcaagtgctcacagtccagtgagtagcttgtcgtaatgagcaattctgtggcggaaccgactactttgggtgtccgtgtttccttttatttttatcattggctgcttatggtgacaatctaaggttgccatcatatagcttttggattggccatcccggtgatatttcgaattattcaatttgctgtttgcagctccttttaaacagtattcactcaccagcattcatattttactcttgagttattaacaaatagtcaaaa

SEQ ID NO: 33136 - DNA, 749 bp, synthetic construct
  source 1..749: mol_type = other DNA
ttgccagttttttgaaacgtgtggtttgacgtctaaccattatggcagtgggtggagtactgcaaagatgtcaccgtgctttacacggtttttgaaccccacaccggctgtttggcgcttgcaggacagcaggtttattttcttttaactctctctttctagccacacacgatctatgtgtgtgggcggagtgatactcccgttccttcttggacaggcggcctccacgccctttgtggatcttaaggctaccaagtcactggtgttggaaagtgaagagaaaggagttccttgggaactacatgtggcattgacagaggttgtagcgatgctgtgtgtgtgtgcggattacccccgtggcgacacggaccccacaggccaaaagccctgtccgaaaggacccacacagtggagcaaccccagctcccctcttcaatgttttgtgttagcaaccttggtattattttctctcaagcttccaatacaccgggccccaaagatgtcctgaaggtaccccgtgtatctgaggatgagcaccatcaactacccggacttgttctttcgagaacagacgcatgtggtaacccagccccgatcctaaggggtcggggcttttgctcactcagcacaggatctgatcaggagacctcccccccctgctttacagggggcgggggtttaaaaattgcccaaggcctggcaaataacctaggggactaggttttcctttttattttaaagttgtcaat

SEQ ID NO: 33137 - DNA, 722 bp, synthetic construct
  source 1..722: mol_type = other DNA
ttcccacccacagggcccactgggcgctagcacactggtatcacggtacctttgtgcgcctgttttatccaccctcccccaatgtaacttagaagcacaccaaacgcggtcaataggcggctcagtacaccaactgagtctcgaccaagcacttctgttaccccggactgagtatcaataggctgctcacgcggctgaaggagaaaacgttcgttacccggccaattacttcgagaaacctagtaccaccatgaaggttgcgcggcgtttcgctccacacaaccccagtgtagatcaggtcgatgagccaccgcattccccacgggcgaccgtggcggtggctgcgctggcggcctgcccatggggcaacccatgggacgcttcaatactgacatggtgtgaagagtctattgagctaattggtagtcctccggcccctgaatgcggctaatcctaactgcggagcagacacccacatgccagtgggcagtctgtcgtaacgggtaactctgcagcggaaccgactactttgggtgtccgtgtttccttttattctcatactggctgcttatggtgacaattgaaagattgttgccatatagctattggattggccatccggtgacaaacagagcggttgtttacctatttgtcggttttataccattgaattacaaggttctgaaaaccctcaatttcattttagcacttaataccacaaa

SEQ ID NO: 33138 - DNA, 742 bp, synthetic construct
  source 1..742: mol_type = other DNA
ttaaaacagcctgtgggttgttcccacccacagggcccattgggcgctagcacactggtatcacggtacccttgtgcgcctgttttatccacccctccccatcgtaacctagaagcatgactccaacggtcaatagacagctcagtaaaccaattgagccttgaccaagcacttctgttaccccggactgagtatcaataggctgctcacgcggccgaaggagaaaatgttcgttacccggccaattacttcgagaaacctagtaccaccatgaaggttgcgcggtgtttcgctcagcacaaccccagtgtagatcaggccgatgagtcaccgcattccccacgggtgaccgtggcggtggctgcgctggcggcctgcccatggggcaacccatgggacgcttcaatactgacatggtgtgaagagtctattgagctaattggtagtcctccggcccctgaatgcggctaatcctaactgcggagcagatacccacgcaccagtgggcagtctgtcgtaacgggcaactctgcagcggaaccgactactttgggtgtccgtgtttccttttattcttgtactggctgcttatggtgacaattgagagattgttaccatatagctattggattggccatccagtgtcaaacagagcgattgtctacttgttcattggttttataccattgagttacaaggttctagccactcttaacttcattttaacactcaatacatcaaa

SEQ ID NO: 33139 - DNA, 748 bp, synthetic construct
  source 1..748: mol_type = other DNA
tggggttaaaacagctctggggttgttcccaccccagaggcccacgtggcggctagtactctggtatcatggtacctttgtacgcctgttttatacccctaccccacgtaactttagaagcaactcaacaagttcaatagggggggtacaaaccagtaccaccacgaacaagcactcctgttaccccggtgatcttgcataagctgtgcccacggctgaaggcgagagatccgttatccgcttgagtacttcgagaagcctagtatcaccttgggatcttcgacgcgttgcgctcagcactccacccgagtgtagcttaggctgatgagcctgggcattccccaccggcgacggtggcccaggctgcgttggcggcctacccatggctaacaccatgggacgctagatgtgaacaaggtgtgaagagcctattgagctactcaagagtcctccggcccctgaatgcggctaatcccaaccacggagcaggtgtcttcaacccagaaggtagcctgtcgtaacgcgtaagtctgtggcggaaccgactactttgggtgtccgtgtttccttttatcttttatatggctgcttatggtgacaatcacagattgttatcataaagcgatttggattggccatccggtgaagtacaaacacattatctacttgtttgttggatttactccactcacacaccccacccccaatataacatctattgttttgttgacaagaaattactttcgaa

SEQ ID NO: 33140 - DNA, 748 bp, synthetic construct
  source 1..748: mol_type = other DNA
gttaaaacagctctggggttgttcccaccccagaggcccaagtggcggctagtactccggtatcacggtacccttgtacgcctgttttatactcccttcccccgtaacttagaagagttaaaccaagttcaatagaagggggtacaaaccagtaccaccacgaacaagcacttctgtttccccggtgatattgtatagactgtacccacggtcgaaaatgattgatccgttatccgctctcatacttcgagaagcctagtatcatcttggaatcttcgatgcgttgcgctcggcactcgatcccggagtgtagcttaggtcgatgagtctggacactcctcaccggtgacggtggtccagactgcgttggcggcctacctgtggtccaaagccacaggacgctagttgtgaacaaggtgtgaagagcctattgagctatgagagagtcctccggcccctgaatgcggctaatcccaaccacggagcgagagtgcgcaagccagcgtatatctcgtcgtaacgcgcaagtctgtggcggaaccgactactttgggtgtccgtgtttccttttatttttgtattggctgcttatggtgacaatcacagattgttatcataaagcgaattggattggccatccggtgaaagtgaaatacattatttgcttatttattggattcagtccacctaattgctatactcacgaacccaccacagccgttttgttgactgaaagccggtaccaata

SEQ ID NO: 33141 - DNA, 746 bp, synthetic construct
  source 1..746: mol_type = other DNA
ttaaaacagctctggggttgttcccaccccagaggcccacgtggcggctagtactccggtatcacggtacccttgtacgcctgttttatactcccttccccgtaacttagaagtatacaaaccaagttcaatagaagggggtacaaaccagtaccaccacgaacaagcacttctgtttccccggtgaagttgcatagattgtccccacggtcgaaagcgactgatccgttatccgctcttgtacttcgggaagcctagtatcaccttcggatcttcgatgcgttgcgctcagcactcaaccccagagtgtagcttaggtcgatgagtctggacgaacctcactggtgacagtggtccaggctgcgttggcggcctacctgtggcccaaagccacaggacgctagttgtgaacaaggtgtgaagagcctactgagctacatgagagtcctccggcccctgaatgcggctaatcccaaccacggagcaggtggtcacaaaccagtggtttgcctgtcgtaacgcgaaagtctgtggcggaaccgactactttgggtgtccgtgtttccttttattcttattatggctgcttatggtgacaatcttagattgttatcataaagcgaattggattggccatccggggaaaattaagcatatcatacacttgtttgttggattcacccctctgattacacatactcttggcttgattaggattgttgcattgataagacactattgttgca

SEQ ID NO: 33142 - DNA, 732 bp, synthetic construct
  source 1..732: mol_type = other DNA
gggttgttcccaccccagaggcccacgtggcggctagtactccggtatcacggtacccttgtacgcctgttttatactcccttccccgtaacttagaagtatacaagccaagttcaatagaagggggtacaaaccagtaccaccacgaacaagcacttctgtttccccggtgaagttgcatagattgttcccacggtcgaaagcgactgatccgttacccgctcatgtacttcgggaagcctagtatcaccttcggatcttcgatgcgttgcgctcagcactcaaccccagagtgtagcttaggtcgatgagtctggacaaacctcactggcgacagtggtccaggctgcgttggcggcctacctgtggcccaaagccacaggacgctagttgtgaacaaggtgtgaagagcctactgagctacatgagagtcctccggcccctgaatgcggctaatctcaaccacggagcaggtggtcacaaaccagtgatttgcctgtcgtaacgcgaaagtctgtggcggaaccgactactttgggtgtccgtgtttccttttactctcattatggctgcttatggtgacaatcctagattgttatcataaagcgagttggattggccatccggtgaaaatcaagcacatcatatatttgtttgttgggtttaaccctctgattgcacgcactcttggcttggttaggattattgtgtggaaaaggcaccatagttaca

SEQ ID NO: 33143 - DNA, 40 bp, synthetic construct
  source 1..40: mol_type = other DNA
actcactatttgttttcgcgcccagttgcaaaaagtgtcg

SEQ ID NO: 33144 - DNA, 780 bp, synthetic construct
  source 1..780: mol_type = other DNA
ttaaaacagcctgtgggttgatcccacccacaggcccattgggcgctagcactctggtatcacggtacctttgtgcgcctgttttataccccctactcactatttgttttcgcgcccagttgcaaaaagtgtcgcccccaactgtaacttagaagtaacacacaccgatcaacagtcagcgtggcacaccagccacgttttgatcaagcacttctgttaccccggactgagtatcaatagactgctcacgcggttgaaggagaaagcgttcgttatccggccaactacttcgaaaaacctagtaacaccgtggaagttgcagagtgtttcgctcagcactaccccagtgtagatcaggtcgatgagtcaccgcattccccacgggcgaccgtggcggtggctgcgttggcggcctgcccatggggaaacccatgggacgctctaatacagacatggtgcgaagagtctattgagctagttggtagtcctccggcccctgaatgcggctaatcctaactgcggagcacacaccctcaagccagagggcagtgtgtcgtaacgggcaactctgcagcggaaccgactactttgggtgtcgtgtttcattttattcctatactggctgcttatggtgacaattgagagatcgttaccatatagctattggattggccatccggtgactaatagagctattatatatccctttgttgggtttataccacttagcttgaaagaggttaaaacattacaattcattgttaagttgaatacagcaaa

SEQ ID NO: 33145 - DNA, 770 bp, synthetic construct
  source 1..770: mol_type = other DNA
ttaaaacagcctgtgggttgatcccacccacaggcccattgggcgctagcactctggtatcacggtacctttgtgcgcctgttttataccccctcccccaactgtaacttagaagtaacacacaccgatcaacagtcagcgtgactcactatttgttttcgcgcccagttgcaaaaagtgtcgcacgttttgatcaagcacttctgttaccccggactgagtatcaatagactgctcacgcggttgaaggagaaagcgttcgttatccggccaactacttcgaaaaacctagtaacaccgtggaagttgcagagtgtttcgctcagcactaccccagtgtagatcaggtcgatgagtcaccgcattccccacgggcgaccgtggcggtggctgcgttggcggcctgcccatggggaaacccatgggacgctctaatacagacatggtgcgaagagtctattgagctagttggtagtcctccggcccctgaatgcggctaatcctaactgcggagcacacaccctcaagccagagggcagtgtgtcgtaacgggcaactctgcagcggaaccgactactttgggtgtcgtgtttcattttattcctatactggctgcttatggtgacaattgagagatcgttaccatatagctattggattggccatccggtgactaatagagctattatatatccctttgttgggtttataccacttagcttgaaagaggttaaaacattacaattcattgttaagttgaatacagcaaa

SEQ ID NO: 33146 - DNA, 780 bp, synthetic construct
  source 1..780: mol_type = other DNA
ttaaaacagcctgtgggttgatcccacccacaggcccattgggcgctagcactctggtatcacggtacctttgtgcgcctgttttataccccctcccccaactgtaacttagaagtaacacacaccgatcaacagtcagcgtggcacaccagccacgttttgatcaagcacttctgttaccactcactatttgttttcgcgcccagttgcaaaaagtgtcgccggactgagtatcaatagactgctcacgcggttgaaggagaaagcgttcgttatccggccaactacttcgaaaaacctagtaacaccgtggaagttgcagagtgtttcgctcagcactaccccagtgtagatcaggtcgatgagtcaccgcattccccacgggcgaccgtggcggtggctgcgttggcggcctgcccatggggaaacccatgggacgctctaatacagacatggtgcgaagagtctattgagctagttggtagtcctccggcccctgaatgcggctaatcctaactgcggagcacacaccctcaagccagagggcagtgtgtcgtaacgggcaactctgcagcggaaccgactactttgggtgtcgtgtttcattttattcctatactggctgcttatggtgacaattgagagatcgttaccatatagctattggattggccatccggtgactaatagagctattatatatccctttgttgggtttataccacttagcttgaaagaggttaaaacattacaattcattgttaagttgaatacagcaaa

SEQ ID NO: 33147 - DNA, 776 bp, synthetic construct
  source 1..776: mol_type = other DNA
ttaaaacagcctgtgggttgatcccacccacaggcccattgggcgctagcactctggtatcacggtacctttgtgcgcctgttttataccccctcccccaactgtaacttagaagtaacacacaccgatcaacagtcagcgtggcacaccagccacgttttgatcaagcacttctgttaccccggactgagtatcaatagactgcactcactatttgttttcgcgcccagttgcaaaaagtgtcggcggttgaaggagaaagcgttcgttatccggccaactacttcgaaaaacctagtaacaccgtggaagttgcagagtgtttcgctcagcactaccccagtgtagatcaggtcgatgagtcaccgcattccccacgggcgaccgtggcggtggctgcgttggcggcctgcccatggggaaacccatgggacgctctaatacagacatggtgcgaagagtctattgagctagttggtagtcctccggcccctgaatgcggctaatcctaactgcggagcacacaccctcaagccagagggcagtgtgtcgtaacgggcaactctgcagcggaaccgactactttgggtgtcgtgtttcattttattcctatactggctgcttatggtgacaattgagagatcgttaccatatagctattggattggccatccggtgactaatagagctattatatatccctttgttgggtttataccacttagcttgaaagaggttaaaacattacaattcattgttaagttgaatacagcaaa

SEQ ID NO: 33148 - DNA, 780 bp, synthetic construct
  source 1..780: mol_type = other DNA
ttaaaacagcctgtgggttgatcccacccacaggcccattgggcgctagcactctggtatcacggtacctttgtgcgcctgttttataccccctcccccaactgtaacttagaagtaacacacaccgatcaacagtcagcgtggcacaccagccacgttttgatcaagcacttctgttaccccggactgagtatcaatagactgctcacgcggttgaaggagaaagcgttcgttatactcactatttgttttcgcgcccagttgcaaaaagtgtcgccggccaactacttcgaaaaacctagtaacaccgtggaagttgcagagtgtttcgctcagcactaccccagtgtagatcaggtcgatgagtcaccgcattccccacgggcgaccgtggcggtggctgcgttggcggcctgcccatggggaaacccatgggacgctctaatacagacatggtgcgaagagtctattgagctagttggtagtcctccggcccctgaatgcggctaatcctaactgcggagcacacaccctcaagccagagggcagtgtgtcgtaacgggcaactctgcagcggaaccgactactttgggtgtcgtgtttcattttattcctatactggctgcttatggtgacaattgagagatcgttaccatatagctattggattggccatccggtgactaatagagctattatatatccctttgttgggtttataccacttagcttgaaagaggttaaaacattacaattcattgttaagttgaatacagcaaa

SEQ ID NO: 33149 - DNA, 775 bp, synthetic construct
  source 1..775: mol_type = other DNA
ttaaaacagcctgtgggttgatcccacccacaggcccattgggcgctagcactctggtatcacggtacctttgtgcgcctgttttataccccctcccccaactgtaacttagaagtaacacacaccgatcaacagtcagcgtggcacaccagccacgttttgatcaagcacttctgttaccccggactgagtatcaatagactgctcacgcggttgaaggagaaagcgttcgttatccggccaactacttcgaaaaacctagtaacaccgtggaagttgcagagtgtttcgctcagcactactcactatttgttttcgcgcccagttgcaaaaagtgtcgagtgtagatcaggtcgatgagtcaccgcattccccacgggcgaccgtggcggtggctgcgttggcggcctgcccatggggaaacccatgggacgctctaatacagacatggtgcgaagagtctattgagctagttggtagtcctccggcccctgaatgcggctaatcctaactgcggagcacacaccctcaagccagagggcagtgtgtcgtaacgggcaactctgcagcggaaccgactactttgggtgtcgtgtttcattttattcctatactggctgcttatggtgacaattgagagatcgttaccatatagctattggattggccatccggtgactaatagagctattatatatccctttgttgggtttataccacttagcttgaaagaggttaaaacattacaattcattgttaagttgaatacagcaaa

SEQ ID NO: 33150 - DNA, 760 bp, synthetic construct
  source 1..760: mol_type = other DNA
ttaaaacagcctgtgggttgatcccacccacaggcccattgggcgctagcactctggtatcacggtacctttgtgcgcctgttttataccccctcccccaactgtaacttagaagtaacacacaccgatcaacagtcagcgtggcacaccagccacgttttgatcaagcacttctgttaccccggactgagtatcaatagactgctcacgcggttgaaggagaaagcgttcgttatccggccaactacttcgaaaaacctagtaacaccgtggaagttgcagagtgtttcgctcagcactaccccagtgtagatcaggtcgatgagtcaccgcactcactatttgttttcgcgcccagttgcaaaaagtgtcggcggtggctgcgttggcggcctgcccatggggaaacccatgggacgctctaatacagacatggtgcgaagagtctattgagctagttggtagtcctccggcccctgaatgcggctaatcctaactgcggagcacacaccctcaagccagagggcagtgtgtcgtaacgggcaactctgcagcggaaccgactactttgggtgtcgtgtttcattttattcctatactggctgcttatggtgacaattgagagatcgttaccatatagctattggattggccatccggtgactaatagagctattatatatccctttgttgggtttataccacttagcttgaaagaggttaaaacattacaattcattgttaagttgaatacagcaaa

SEQ ID NO: 33151 - DNA, 776 bp, synthetic construct
  source 1..776: mol_type = other DNA
ttaaaacagcctgtgggttgatcccacccacaggcccattgggcgctagcactctggtatcacggtacctttgtgcgcctgttttataccccctcccccaactgtaacttagaagtaacacacaccgatcaacagtcagcgtggcacaccagccacgttttgatcaagcacttctgttaccccggactgagtatcaatagactgctcacgcggttgaaggagaaagcgttcgttatccggccaactacttcgaaaaacctagtaacaccgtggaagttgcagagtgtttcgctcagcactaccccagtgtagatcaggtcgatgagtcaccgcattccccacgggcgaccgtggcggtggctgcgttggcggcctgcccatgggactcactatttgttttcgcgcccagttgcaaaaagtgtcgcccatgggacgctctaatacagacatggtgcgaagagtctattgagctagttggtagtcctccggcccctgaatgcggctaatcctaactgcggagcacacaccctcaagccagagggcagtgtgtcgtaacgggcaactctgcagcggaaccgactactttgggtgtcgtgtttcattttattcctatactggctgcttatggtgacaattgagagatcgttaccatatagctattggattggccatccggtgactaatagagctattatatatccctttgttgggtttataccacttagcttgaaagaggttaaaacattacaattcattgttaagttgaatacagcaaa

SEQ ID NO: 33152 - DNA, 784 bp, synthetic construct
  source 1..784: mol_type = other DNA
ttaaaacagcctgtgggttgatcccacccacaggcccattgggcgctagcactctggtatcacggtacctttgtgcgcctgttttataccccctcccccaactgtaacttagaagtaacacacaccgatcaacagtcagcgtggcacaccagccacgttttgatcaagcacttctgttaccccggactgagtatcaatagactgctcacgcggttgaaggagaaagcgttcgttatccggccaactacttcgaaaaacctagtaacaccgtggaagttgcagagtgtttcgctcagcactaccccagtgtagatcaggtcgatgagtcaccgcattccccacgggcgaccgtggcggtggctgcgttggcggcctgcccatggggaaacccatgggacgctctaatacagacatggtgcgaagagtctattgagctagttggtagtcactcactatttgttttcgcgcccagttgcaaaaagtgtcgccccctccggcccctgaatgcggctaatcctaactgcggagcacacaccctcaagccagagggcagtgtgtcgtaacgggcaactctgcagcggaaccgactactttgggtgtcgtgtttcattttattcctatactggctgcttatggtgacaattgagagatcgttaccatatagctattggattggccatccggtgactaatagagctattatatatccctttgttgggtttataccacttagcttgaaagaggttaaaacattacaattcattgttaagttgaatacagcaaa

SEQ ID NO: 33153 - DNA, 774 bp, synthetic construct
  source 1..774: mol_type = other DNA
ttaaaacagcctgtgggttgatcccacccacaggcccattgggcgctagcactctggtatcacggtacctttgtgcgcctgttttataccccctcccccaactgtaacttagaagtaacacacaccgatcaacagtcagcgtggcacaccagccacgttttgatcaagcacttctgttaccccggactgagtatcaatagactgctcacgcggttgaaggagaaagcgttcgttatccggccaactacttcgaaaaacctagtaacaccgtggaagttgcagagtgtttcgctcagcactaccccagtgtagatcaggtcgatgagtcaccgcattccccacgggcgaccgtggcggtggctgcgttggcggcctgcccatggggaaacccatgggacgctctaatacagacatggtgcgaagagtctattgagctagttggtagtcctccggcccctgaatgcggctaatcctaactgcggagcacacaccctcactcactatttgttttcgcgcccagttgcaaaaagtgtcggagggcagtgtgtcgtaacgggcaactctgcagcggaaccgactactttgggtgtcgtgtttcattttattcctatactggctgcttatggtgacaattgagagatcgttaccatatagctattggattggccatccggtgactaatagagctattatatatccctttgttgggtttataccacttagcttgaaagaggttaaaacattacaattcattgttaagttgaatacagcaaa

SEQ ID NO: 33154 - DNA, 780 bp, synthetic construct
  source 1..780: mol_type = other DNA
ttaaaacagcctgtgggttgatcccacccacaggcccattgggcgctagcactctggtatcacggtacctttgtgcgcctgttttataccccctcccccaactgtaacttagaagtaacacacaccgatcaacagtcagcgtggcacaccagccacgttttgatcaagcacttctgttaccccggactgagtatcaatagactgctcacgcggttgaaggagaaagcgttcgttatccggccaactacttcgaaaaacctagtaacaccgtggaagttgcagagtgtttcgctcagcactaccccagtgtagatcaggtcgatgagtcaccgcattccccacgggcgaccgtggcggtggctgcgttggcggcctgcccatggggaaacccatgggacgctctaatacagacatggtgcgaagagtctattgagctagttggtagtcctccggcccctgaatgcggctaatcctaactgcggagcacacaccctcaagccagagggcagtgtgtcgtaacgggcaactctgcagcggaaccgactactttgggtgtcgtgtttcattttactcactatttgttttcgcgcccagttgcaaaaagtgtcgattcctatactggctgcttatggtgacaattgagagatcgttaccatatagctattggattggccatccggtgactaatagagctattatatatccctttgttgggtttataccacttagcttgaaagaggttaaaacattacaattcattgttaagttgaatacagcaaa

SEQ ID NO: 33155 - DNA, 653 bp, synthetic construct
  source 1..653: mol_type = other DNA
ttaaaacagcggatgggtaccccaccatccgacccactgggtgtagtactctggtacttcgtacctttgtacgcctgttcttcccattgtacccttcctgaacttccaacccaagtaacgttagaagctcaacatttagtacaacaggaagcaccacatccagtggtgtttagtacaagcacttctgtttccccggagcgaggtataggctgtacccactgccaaaaacctttaaccgttatccgccaaccaactacgtaaaagctagtagtattatgtttttaactaggcgttcgatcaggcactcactatttgttttcgcgcccagttgcaaaaagtgtcggccagtttggtcgatgaggctaggaattccccacgggtgaccgtgtcctagcctgcgtggcggccaacccagcttatgctgggacgcctttttatagacatggtgtgaagactcgcatgtgcttggttgtgattcctccggcccctgaatgcggctaaccttaaccctggagccttgtgtcacaaaccagtgatgataaggtcgtaatgagcaattccgggacgggaccgactactttgggtgtccgtgtttcttatttttcttattattgtcttatggtcacagcatatatataacatatactgtgatc

SEQ ID NO: 33156 - DNA, 655 bp, synthetic construct
  source 1..655: mol_type = other DNA
ttaaaacagcggatgggtaccccaccatccgacccactgggtgtagtactctggtacttcgtacctttgtacgcctgttcttcccattgtacccttcctgaacttccaacccaagtaacgttagaagctcaacatttagtacaacaggaagcaccacatccagtggtgtttagtacaagcacttctgtttccccggagcgaggtataggctgtacccactgccaaaaacctttaaccgttatccgccaaccaactacgtaaaagctagtagtattatgtttttaactaggcgttcgatcaggcgactcactatttgttttcgcgcccagttgcaaaaagtgtcgcgccagtttggtcgatgaggctaggaattccccacgggtgaccgtgtcctagcctgcgtggcggccaacccagcttatgctgggacgcctttttatagacatggtgtgaagactcgcatgtgcttggttgtgattcctccggcccctgaatgcggctaaccttaaccctggagccttgtgtcacaaaccagtgatgataaggtcgtaatgagcaattccgggacgggaccgactactttgggtgtccgtgtttcttatttttcttattattgtcttatggtcacagcatatatataacatatactgtgatc

SEQ ID NO: 33157 - DNA, 657 bp, synthetic construct
  source 1..657: mol_type = other DNA
ttaaaacagcggatgggtaccccaccatccgacccactgggtgtagtactctggtacttcgtacctttgtacgcctgttcttcccattgtacccttcctgaacttccaacccaagtaacgttagaagctcaacatttagtacaacaggaagcaccacatccagtggtgtttagtacaagcacttctgtttccccggagcgaggtataggctgtacccactgccaaaaacctttaaccgttatccgccaaccaactacgtaaaagctagtagtattatgtttttaactaggcgttcgatcaggcggactcactatttgttttcgcgcccagttgcaaaaagtgtcgccgccagtttggtcgatgaggctaggaattccccacgggtgaccgtgtcctagcctgcgtggcggccaacccagcttatgctgggacgcctttttatagacatggtgtgaagactcgcatgtgcttggttgtgattcctccggcccctgaatgcggctaaccttaaccctggagccttgtgtcacaaaccagtgatgataaggtcgtaatgagcaattccgggacgggaccgactactttgggtgtccgtgtttcttatttttcttattattgtcttatggtcacagcatatatataacatatactgtgatc

SEQ ID NO: 33158 - DNA, 659 bp, synthetic construct
  source 1..659: mol_type = other DNA
ttaaaacagcggatgggtaccccaccatccgacccactgggtgtagtactctggtacttcgtacctttgtacgcctgttcttcccattgtacccttcctgaacttccaacccaagtaacgttagaagctcaacatttagtacaacaggaagcaccacatccagtggtgtttagtacaagcacttctgtttccccggagcgaggtataggctgtacccactgccaaaaacctttaaccgttatccgccaaccaactacgtaaaagctagtagtattatgtttttaactaggcgttcgatcaggtggaactcactatttgttttcgcgcccagttgcaaaaagtgtcgtccactagtttggtcgatgaggctaggaattccccacgggtgaccgtgtcctagcctgcgtggcggccaacccagcttatgctgggacgcctttttatagacatggtgtgaagactcgcatgtgcttggttgtgattcctccggcccctgaatgcggctaaccttaaccctggagccttgtgtcacaaaccagtgatgataaggtcgtaatgagcaattccgggacgggaccgactactttgggtgtccgtgtttcttatttttcttattattgtcttatggtcacagcatatatataacatatactgtgatc

SEQ ID NO: 33159 - DNA, 661 bp, synthetic construct
  source 1..661: mol_type = other DNA
ttaaaacagcggatgggtaccccaccatccgacccactgggtgtagtactctggtacttcgtacctttgtacgcctgttcttcccattgtacccttcctgaacttccaacccaagtaacgttagaagctcaacatttagtacaacaggaagcaccacatccagtggtgtttagtacaagcacttctgtttccccggagcgaggtataggctgtacccactgccaaaaacctttaaccgttatccgccaaccaactacgtaaaagctagtagtattatgtttttaactaggcgttcgatcaggtggagactcactatttgttttcgcgcccagttgcaaaaagtgtcgctccactagtttggtcgatgaggctaggaattccccacgggtgaccgtgtcctagcctgcgtggcggccaacccagcttatgctgggacgcctttttatagacatggtgtgaagactcgcatgtgcttggttgtgattcctccggcccctgaatgcggctaaccttaaccctggagccttgtgtcacaaaccagtgatgataaggtcgtaatgagcaattccgggacgggaccgactactttgggtgtccgtgtttcttatttttcttattattgtcttatggtcacagcatatatataacatatactgtgatc

SEQ ID NO: 33160 - DNA, 663 bp, synthetic construct
  source 1..663: mol_type = other DNA
ttaaaacagcggatgggtaccccaccatccgacccactgggtgtagtactctggtacttcgtacctttgtacgcctgttcttcccattgtacccttcctgaacttccaacccaagtaacgttagaagctcaacatttagtacaacaggaagcaccacatccagtggtgtttagtacaagcacttctgtttccccggagcgaggtataggctgtacccactgccaaaaacctttaaccgttatccgccaaccaactacgtaaaagctagtagtattatgtttttaactaggcgttcgatcaggtggaggactcactatttgttttcgcgcccagttgcaaaaagtgtcgcctccactagtttggtcgatgaggctaggaattccccacgggtgaccgtgtcctagcctgcgtggcggccaacccagcttatgctgggacgcctttttatagacatggtgtgaagactcgcatgtgcttggttgtgattcctccggcccctgaatgcggctaaccttaaccctggagccttgtgtcacaaaccagtgatgataaggtcgtaatgagcaattccgggacgggaccgactactttgggtgtccgtgtttcttatttttcttattattgtcttatggtcacagcatatatataacatatactgtgatc

SEQ ID NO: 33161 - DNA, 646 bp, synthetic construct
  source 1..646: mol_type = other DNA
ttaaaacagcggatgggtaccccaccatccgacccactgggtgtagtactctggtacttcgtacctttgtacgcctgttcttcccattgtacccttcctgaacttccaacccaagtaacgttagaagctcaacatttagtacaacaggaagcaccacatccagtggtgtttagtacaagcacttctgtttccccggagcgaggtataggctgtacccactgccaaaaacctttaaccgttatccgccaaccaactacgtaaaagctagtagtattatgtttttaactaggcgttcgatcaggtggatttcccctccactagtttggtcgatgaggctaggaactcactatttgttttcgcgcccagttgcaaaaagtgtcgtcctagcctgcgtggcggccaacccagcttatgctgggacgcctttttatagacatggtgtgaagactcgcatgtgcttggttgtgattcctccggcccctgaatgcggctaaccttaaccctggagccttgtgtcacaaaccagtgatgataaggtcgtaatgagcaattccgggacgggaccgactactttgggtgtccgtgtttcttatttttcttattattgtcttatggtcacagcatatatataacatatactgtgatc

SEQ ID NO: 33162 - DNA, 662 bp, synthetic construct
  source 1..662: mol_type = other DNA
ttaaaacagcggatgggtaccccaccatccgacccactgggtgtagtactctggtacttcgtacctttgtacgcctgttcttcccattgtacccttcctgaacttccaacccaagtaacgttagaagctcaacatttagtacaacaggaagcaccacatccagtggtgtttagtacaagcacttctgtttccccggagcgaggtataggctgtacccactgccaaaaacctttaaccgttatccgccaaccaactacgtaaaagctagtagtattatgtttttaactaggcgttcgatcaggtggatttcccctccactagtttggtcgatgaggctaggaattccccacggactcactatttgttttcgcgcccagttgcaaaaagtgtcgccgtgtcctagcctgcgtggcggccaacccagcttatgctgggacgcctttttatagacatggtgtgaagactcgcatgtgcttggttgtgattcctccggcccctgaatgcggctaaccttaaccctggagccttgtgtcacaaaccagtgatgataaggtcgtaatgagcaattccgggacgggaccgactactttgggtgtccgtgtttcttatttttcttattattgtcttatggtcacagcatatatataacatatactgtgatc

SEQ ID NO: 33163 - DNA, 656 bp, synthetic construct
  source 1..656: mol_type = other DNA
ttaaaacagcggatgggtaccccaccatccgacccactgggtgtagtactctggtacttcgtacctttgtacgcctgttcttcccattgtacccttcctgaacttccaacccaagtaacgttagaagctcaacatttagtacaacaggaagcaccacatccagtggtgtttagtacaagcacttctgtttccccggagcgaggtataggctgtacccactgccaaaaacctttaaccgttatccgccaaccaactacgtaaaagctagtagtattatgtttttaactaggcgttcgatcaggtggatttcccctccactagtttggtcgatgaggctaggaattccccacgggtgaccgtgtcctagcctgcgtggcggccaacccactcactatttgttttcgcgcccagttgcaaaaagtgtcggggacgcctttttatagacatggtgtgaagactcgcatgtgcttggttgtgattcctccggcccctgaatgcggctaaccttaaccctggagccttgtgtcacaaaccagtgatgataaggtcgtaatgagcaattccgggacgggaccgactactttgggtgtccgtgtttcttatttttcttattattgtcttatggtcacagcatatatataacatatactgtgatc

SEQ ID NO: 33164 - DNA, 658 bp, synthetic construct
  source 1..658: mol_type = other DNA
ttaaaacagcggatgggtaccccaccatccgacccactgggtgtagtactctggtacttcgtacctttgtacgcctgttcttcccattgtacccttcctgaacttccaacccaagtaacgttagaagctcaacatttagtacaacaggaagcaccacatccagtggtgtttagtacaagcacttctgtttccccggagcgaggtataggctgtacccactgccaaaaacctttaaccgttatccgccaaccaactacgtaaaagctagtagtattatgtttttaactaggcgttcgatcaggtggatttcccctccactagtttggtcgatgaggctaggaattccccacgggtgaccgtgtcctagcctgcgtggcggccaacccgactcactatttgttttcgcgcccagttgcaaaaagtgtcgcgggacgcctttttatagacatggtgtgaagactcgcatgtgcttggttgtgattcctccggcccctgaatgcggctaaccttaaccctggagccttgtgtcacaaaccagtgatgataaggtcgtaatgagcaattccgggacgggaccgactactttgggtgtccgtgtttcttatttttcttattattgtcttatggtcacagcatatatataacatatactgtgatc

SEQ ID NO: 33165 - DNA, 660 bp, synthetic construct
  source 1..660: mol_type = other DNA
ttaaaacagcggatgggtaccccaccatccgacccactgggtgtagtactctggtacttcgtacctttgtacgcctgttcttcccattgtacccttcctgaacttccaacccaagtaacgttagaagctcaacatttagtacaacaggaagcaccacatccagtggtgtttagtacaagcacttctgtttccccggagcgaggtataggctgtacccactgccaaaaacctttaaccgttatccgccaaccaactacgtaaaagctagtagtattatgtttttaactaggcgttcgatcaggtggatttcccctccactagtttggtcgatgaggctaggaattccccacgggtgaccgtgtcctagcctgcgtggcggccaacccggactcactatttgttttcgcgcccagttgcaaaaagtgtcgccgggacgcctttttatagacatggtgtgaagactcgcatgtgcttggttgtgattcctccggcccctgaatgcggctaaccttaaccctggagccttgtgtcacaaaccagtgatgataaggtcgtaatgagcaattccgggacgggaccgactactttgggtgtccgtgtttcttatttttcttattattgtcttatggtcacagcatatatataacatatactgtgatc

SEQ ID NO: 33166 - DNA, 662 bp, synthetic construct
  source 1..662: mol_type = other DNA
ttaaaacagcggatgggtaccccaccatccgacccactgggtgtagtactctggtacttcgtacctttgtacgcctgttcttcccattgtacccttcctgaacttccaacccaagtaacgttagaagctcaacatttagtacaacaggaagcaccacatccagtggtgtttagtacaagcacttctgtttccccggagcgaggtataggctgtacccactgccaaaaacctttaaccgttatccgccaaccaactacgtaaaagctagtagtattatgtttttaactaggcgttcgatcaggtggatttcccctccactagtttggtcgatgaggctaggaattccccacgggtgaccgtgtcctagcctgcgtggcggccaacccagcactcactatttgttttcgcgcccagttgcaaaaagtgtcggctgggacgcctttttatagacatggtgtgaagactcgcatgtgcttggttgtgattcctccggcccctgaatgcggctaaccttaaccctggagccttgtgtcacaaaccagtgatgataaggtcgtaatgagcaattccgggacgggaccgactactttgggtgtccgtgtttcttatttttcttattattgtcttatggtcacagcatatatataacatatactgtgatc

SEQ ID NO: 33167 - DNA, 664 bp, synthetic construct
  source 1..664: mol_type = other DNA
ttaaaacagcggatgggtaccccaccatccgacccactgggtgtagtactctggtacttcgtacctttgtacgcctgttcttcccattgtacccttcctgaacttccaacccaagtaacgttagaagctcaacatttagtacaacaggaagcaccacatccagtggtgtttagtacaagcacttctgtttccccggagcgaggtataggctgtacccactgccaaaaacctttaaccgttatccgccaaccaactacgtaaaagctagtagtattatgtttttaactaggcgttcgatcaggtggatttcccctccactagtttggtcgatgaggctaggaattccccacgggtgaccgtgtcctagcctgcgtggcggccaacccagccactcactatttgttttcgcgcccagttgcaaaaagtgtcgggctgggacgcctttttatagacatggtgtgaagactcgcatgtgcttggttgtgattcctccggcccctgaatgcggctaaccttaaccctggagccttgtgtcacaaaccagtgatgataaggtcgtaatgagcaattccgggacgggaccgactactttgggtgtccgtgtttcttatttttcttattattgtcttatggtcacagcatatatataacatatactgtgatc

SEQ ID NO: 33168 - DNA, 666 bp, synthetic construct
  source 1..666: mol_type = other DNA
ttaaaacagcggatgggtaccccaccatccgacccactgggtgtagtactctggtacttcgtacctttgtacgcctgttcttcccattgtacccttcctgaacttccaacccaagtaacgttagaagctcaacatttagtacaacaggaagcaccacatccagtggtgtttagtacaagcacttctgtttccccggagcgaggtataggctgtacccactgccaaaaacctttaaccgttatccgccaaccaactacgtaaaagctagtagtattatgtttttaactaggcgttcgatcaggtggatttcccctccactagtttggtcgatgaggctaggaattccccacgggtgaccgtgtcctagcctgcgtggcggccaacccagcccactcactatttgttttcgcgcccagttgcaaaaagtgtcggggctgggacgcctttttatagacatggtgtgaagactcgcatgtgcttggttgtgattcctccggcccctgaatgcggctaaccttaaccctggagccttgtgtcacaaaccagtgatgataaggtcgtaatgagcaattccgggacgggaccgactactttgggtgtccgtgtttcttatttttcttattattgtcttatggtcacagcatatatataacatatactgtgatc

SEQ ID NO: 33169 - DNA, 695 bp, synthetic construct
  source 1..695: mol_type = other DNA
ttaaaacagcggatgggtaccccaccatccgacccactgggtgtagtactctggtacttcgtacctttgtacgcctgttcttcccattgtacccttcctgaacttccaacccaagtaacgttagaagctcaacatttagtacaacaggaagcaccacatccagtggtgtttagtacaagcacttctgtttccccggagcgaggtataggctgtacccactgccaaaaacctttaaccgttatccgccaaccaactacgtaaaagctagtagtattatgtttttaactaggcgttcgatcaggtggaactcactatttgttttcgcgcccagttgcaaaaagtgtcgtccactagtttggtcgatgaggctaggaattccccacgggtgaccgtgtcctagcctgcgtggcggccaacccagcactcactatttgttttcgcgcccagttgcaaaaagtgtcggctgggacgcctttttatagacatggtgtgaagactcgcatgtgcttggttgtgattcctccggcccctgaatgcggctaaccttaaccctggagccttgtgtcacaaaccagtgatgataaggtcgtaatgagcaattccgggacgggaccgactactttgggtgtccgtgtttcttatttttcttattattgtcttatggtcacagcatatatataacatatactgtgatc

SEQ ID NO: 33170 - DNA, 76 bp, synthetic construct
  source 1..76: mol_type = other DNA
taatacgactcactatagggactcactatttgttttcgcgcccagttgcaaaaagtgtcgccgcatctagagggcc

SEQ ID NO: 33171 - DNA, 76 bp, synthetic construct
  source 1..76: mol_type = other DNA
taatacgactcactatagggtccagaccccaacagactccataactaatatgtcgcaaaaccgcatctagagggcc

SEQ ID NO: 33172 - DNA, 77 bp, synthetic construct
  source 1..77: mol_type = other DNA
taatacgactcactatagggtccgtagaaacgcgttaaggtgaaagtttgagggctcctcaccgcatctagagggcc

SEQ ID NO: 33173 - DNA, 76 bp, synthetic construct
  source 1..76: mol_type = other DNA
taatacgactcactatagggtccgcggcgccatctcatgtttagttgtcctatgtcgagcccgcatctagagggcc

SEQ ID NO: 33174 - RNA, 76 nt, synthetic construct
  source 1..76: mol_type = other RNA
taatacgactcactatagggactcactatttgttttcgcgcccagttgcaaaaagtgtcgccgcatctagagggcc

SEQ ID NO: 33175 - RNA, 76 nt, synthetic construct
  source 1..76: mol_type = other RNA
taatacgactcactatagggtccagaccccaacagactccataactaatatgtcgcaaaaccgcatctagagggcc

SEQ ID NO: 33176 - RNA, 77 nt, synthetic construct
  source 1..77: mol_type = other RNA
taatacgactcactatagggtccgtagaaacgcgttaaggtgaaagtttgagggctcctcaccgcatctagagggcc

SEQ ID NO: 33177 - RNA, 76 nt, synthetic construct
  source 1..76: mol_type = other RNA
taatacgactcactatagggtccgcggcgccatctcatgtttagttgtcctatgtcgagcccgcatctagagggcc

SEQ ID NO: 33178 - RNA, 40 nt, synthetic construct; identical to SEQ ID NO: 33044
  source 1..40: mol_type = other RNA

SEQ ID NO: 33179-33181 - skipped (3 entries)

SEQ ID NO: 33182 - DNA, 22 bp, synthetic construct
  source 1..22: mol_type = other DNA
cagatccgagacactaaaggga

SEQ ID NO: 33183 - DNA, 21 bp, synthetic construct
  source 1..21: mol_type = other DNA
tcctcatcagccttgctttca

SEQ ID NO: 33184 - DNA, 20 bp, synthetic construct
  source 1..20: mol_type = other DNA
atggacgcagatgttcgtgg

SEQ ID NO: 33185 - DNA, 21 bp, synthetic construct
  source 1..21: mol_type = other DNA
tcccttctcgaagcaagtgtc

SEQ ID NO: 33186 - DNA, 21 bp, synthetic construct
  source 1..21: mol_type = other DNA
atgcacggagtagccattacg

SEQ ID NO: 33187 - DNA, 22 bp, synthetic construct
  source 1..22: mol_type = other DNA
tgacaatccaccttgttttcgt

SEQ ID NO: 33188 - DNA, 24 bp, synthetic construct
  source 1..24: mol_type = other DNA
aagggctgcttccaaacctttgac

SEQ ID NO: 33189 - DNA, 24 bp, synthetic construct
  source 1..24: mol_type = other DNA
atactgcctgcctgaagctcttgt

SEQ ID NO: 33190 - DNA, 24 bp, synthetic construct
  source 1..24: mol_type = other DNA
tctcatgcaccaccatcaaggact

SEQ ID NO: 33191 - DNA, 24 bp, synthetic construct
  source 1..24: mol_type = other DNA
accactctccctttgcagaactca

SEQ ID NO: 33192 - DNA, 20 bp, synthetic construct
  source 1..20: mol_type = other DNA
tccagttgccttcttgggac

SEQ ID NO: 33193 - DNA, 20 bp, synthetic construct
  source 1..20: mol_type = other DNA
gtactccagaagaccagagg

SEQ ID NO: 33194 - DNA, 22 bp, synthetic construct
  source 1..22: mol_type = other DNA
acagcaaggtcttcctggttcc

SEQ ID NO: 33195 - DNA, 22 bp, synthetic construct
  source 1..22: mol_type = other DNA
gctcccttacaggctgagttct

SEQ ID NO: 33196 - DNA, 24 bp, synthetic construct
  source 1..24: mol_type = other DNA
gactacctcatgaagatcctgacc

SEQ ID NO: 33197 - DNA, 23 bp, synthetic construct
  source 1..23: mol_type = other DNA
ctcagtaacagtccgcctagaag
